(19) United States
(12) Patent Application Publication
(10) Pub. No.: US 2002/0150922 A1
(43) Pub. Date: Oct. 17, 2002

(54) Compositions and methods for the therapy and diagnosis of colon cancer

(75) Inventors: John A. Stolk, Bothell, WA (US); Jiangchun Xu, Bellevue, WA (US); Ruth A. Chenault, Seattle, WA (US); Madeleine Joy Meagher, Seattle, WA (US)

Correspondence Address: SEED INTELLECTUAL PROPERTY LAW GROUP PLLC, 701 FIFTH AVE, SUITE 6300, SEATTLE, WA, 98104-7092, US

(73) Assignee: Corixa Corporation, Seattle, WA (US)

(21) Appl. No.: 09/998,598

(22) Filed: Nov. 16, 2001

Related U.S. Application Data
(60) Provisional application No. 60/304,037, filed on Jul. 10, 2001.
(60) Provisional application No. 60/279,670, filed on Mar. 28, 2001.
(60) Provisional application No. 60/267,011, filed on Feb. 6, 2001.
(60) Provisional application No. 60/252,222, filed on Nov. 20, 2000.

(51) Int. Cl. C12Q 1/68; G01N 33/574; C07H 21/04; C12N 9/00; C12P 21/02; C12N 5/06

(52) U.S. Cl. 435/6; 435/7.23; 435/69.1; 435/183; 435/320.1; 435/325; 536/23.2

(57) ABSTRACT

Compositions and methods for the therapy and diagnosis of cancer, particularly colon cancer, are disclosed. Illustrative compositions comprise one or more colon tumor polypeptides, immunogenic portions thereof, polynucleotides that encode such polypeptides, antigen presenting cell that expresses such polypeptides, and T cells that are specific for cells expressing such polypeptides. The disclosed compositions are useful, for example, in the diagnosis, prevention and/or treatment of diseases, particularly colon cancer.

### BACKGROUND OF THE INVENTION

[0001] 1. Technical Field of the Invention

[0002] The present invention relates generally to therapy and diagnosis of cancer, such as colon cancer. The invention is more specifically related to polypeptides, comprising at least a portion of a colon tumor protein, and to polynucleotides encoding such polypeptides. Such polypeptides and polynucleotides are useful in pharmaceutical compositions, e.g., vaccines, and other compositions for the diagnosis and treatment of colon cancer.

[0003] 2. Description of the Related Art

[0004] Cancer is a significant health problem throughout the world. Although advances have been made in detection and therapy of cancer, no vaccine or other universally successful method for prevention and/or treatment is currently available. Current therapies, which are generally based on a combination of chemotherapy or surgery and radiation, continue to prove inadequate in many patients.

[0005] Colon cancer is the second most frequently diagnosed malignancy in the United States as well as the second most common cause of cancer death. The five-year survival rate for patients with colorectal cancer detected in an early localized stage is 92%; unfortunately, only 37% of colorectal cancer is diagnosed at this stage. The survival rate drops to 64% if the cancer is allowed to spread to adjacent organs or lymph nodes, and to 7% in patients with distant metastases.

[0006] The prognosis of colon cancer is directly related to the degree of penetration of the tumor through the bowel wall and the presence or absence of nodal involvement, consequently early detection and treatment are especially important. Currently, diagnosis is aided by the use of screening assays for fecal occult blood, sigmoidoscopy, colonoscopy and double contrast barium enemas. Treatment regimens are determined by the type and stage of the cancer, and include surgery, radiation therapy and/or chemotherapy. Recurrence following surgery (the most common form of therapy) is a major problem and is often the ultimate cause of death.

[0007] In spite of considerable research into therapies for these and other cancers, colon cancer remains difficult to diagnose and treat effectively. Accordingly, there is a need in the art for improved methods for detecting and treating such cancers. The present invention fulfills these needs and further provides other related advantages.

### BRIEF SUMMARY OF THE INVENTION

[0008] In one aspect, the present invention provides polynucleotide compositions comprising a sequence selected from the group consisting of:

[0009] (a) sequences provided in SEQ ID NO:1-2589, 2594-2602, and 2604-2605;

[0010] (b) complements of the sequences provided in SEQ ID NO:1-2589, 2594-2602, and 2604-2605

[0011] (c) sequences consisting of at least 20 contiguous residues of a sequence provided in SEQ ID NO:1-2589, 2594-2602, and 2604-2605;

[0012] (d) sequences that hybridize to a sequence provided in SEQ ID NO:1-2589, 2594-2602, and 2604-2605, under moderately stringent conditions;

[0013] (e) sequences having at least 75% identity to a sequence of SEQ ID NO:1-2589, 2594-2602, and 2604-2605;

[0014] (f) sequences having at least 90% identity to a sequence of SEQ ID NO:1-2589, 2594-2602, and 2604-2605; and

[0015] (g) degenerate variants of a sequence provided in SEQ ID NO:1-2589, 2594-2602, and 2604-2605.

[0016] In one preferred embodiment, the polynucleotide compositions of the invention are expressed in at least about 20%, more preferably in at least about 30%, and most preferably in at least about 50% of colon tumors samples tested, at a level that is at least about 2-fold, preferably at least about 5-fold, and most preferably at least about 10-fold higher than that for normal tissues.

[0017] The present invention, in another aspect, provides polypeptide compositions comprising an amino acid sequence that is encoded by a polynucleotide sequence described above.

[0018] The present invention further provides polypeptide compositions comprising an amino acid sequence selected from the group consisting of sequences recited in SEQ ID NOs:2590-2593, 2603, and 2606.

[0019] In certain preferred embodiments, the polypeptides and/or polynucleotides of the present invention are immunogenic, i.e., they are capable of eliciting an immune response, particularly a humoral and/or cellular immune response, as further described herein.

[0020] The present invention further provides fragments, variants and/or derivatives of the disclosed polypeptide and/or polynucleotide sequences, wherein the fragments, variants and/or derivatives preferably have a level of immunogenic activity of at least about 50%, preferably at least about 70% and more preferably at least about 90% of the level of immunogenic activity of a polypeptide sequence set forth in SEQ ID NOs:2590-2593, 2603, and 2606 or a polypeptide sequence encoded by a polynucleotide sequence set forth in SEQ ID NO:1-2589, 2594-2602, and 2604-2605.

[0021] The present invention further provides polynucleotides that encode a polypeptide described above, expression vectors comprising such polynucleotides and host cells transformed or transfected with such expression vectors.

[0022] Within other aspects, the present invention provides pharmaceutical compositions comprising a polypeptide or polynucleotide as described above and a physiologically acceptable carrier.

[0023] Within a related aspect of the present invention, the pharmaceutical compositions, e.g., vaccine compositions, are provided for prophylactic or therapeutic applications. Such compositions generally comprise an immunogenic polypeptide or polynucleotide of the invention and an immunostimulant, such as an adjuvant.

[0024] The present invention further provides pharmaceutical compositions that comprise: (a) an antibody or antigen-binding fragment thereof that specifically binds to a polypeptide of the present invention, or a fragment thereof; and (b) a physiologically acceptable carrier.

[0025] Within further aspects, the present invention provides pharmaceutical compositions comprising: (a) an antigen presenting cell that expresses a polypeptide as described above and (b) a pharmaceutically acceptable carrier or excipient. Illustrative antigen presenting cells include dendritic cells, macrophages, monocytes, fibroblasts and B cells.

[0026] Within related aspects, pharmaceutical compositions are provided that comprise: (a) an antigen presenting cell that expresses a polypeptide as described above and (b) an immunostimulant.

[0027] The present invention further provides, in other aspects, fusion proteins that comprise at least one polypeptide as described above, as well as polynucleotides encoding such fusion proteins, typically in the form of pharmaceutical compositions, e.g., vaccine compositions, comprising a physiologically acceptable carrier and/or an immunostimulant. The fusions proteins may comprise multiple immunogenic polypeptides or portions/variants thereof, as described herein, and may further comprise one or more polypeptide segments for facilitating the expression, purification and/or immunogenicity of the polypeptide(s).

[0028] Within further aspects, the present invention provides methods for stimulating an immune response in a patient, preferably a T cell response in a human patient, comprising administering a pharmaceutical composition described herein. The patient may be afflicted with colon cancer, in which case the methods provide treatment for the disease, or patient considered at risk for such a disease may be treated prophylactically.

[0029] Within further aspects, the present invention provides methods for inhibiting the development of a cancer in a patient, comprising administering to a patient a pharmaceutical composition as recited above. The patient may be afflicted with colon cancer, in which case the methods provide treatment for the disease, or patient considered at risk for such a disease may be treated prophylactically.

[0030] The present invention further provides, within other aspects, methods for removing tumor cells from a biological sample, comprising contacting a biological sample with T cells that specifically react with a polypeptide of the present invention, wherein the step of contacting is performed under conditions and for a time sufficient to permit the removal of cells expressing the protein from the sample.

[0031] Within related aspects, methods are provided for inhibiting the development of a cancer in a patient, comprising administering to a patient a biological sample treated as described above.

[0032] Methods are further provided, within other aspects, for stimulating and/or expanding T cells specific for a polypeptide of the present invention, comprising contacting T cells with one or more of: (i) a polypeptide as described above; (ii) a polynucleotide encoding such a polypeptide; and/or (iii) an antigen presenting cell that expresses such a polypeptide; under conditions and for a time sufficient to permit the stimulation and/or expansion of T cells. Isolated T cell populations comprising T cells prepared as described above are also provided.

[0033] Within further aspects, the present invention provides methods for inhibiting the development of a cancer in a patient, comprising administering to a patient an effective amount of a T cell population as described above.

[0034] The present invention further provides methods for inhibiting the development of a cancer in a patient, comprising the steps of: (a) incubating CD4+ and/or CD8+ T cells isolated from a patient with one or more of: (i) a polypeptide comprising at least an immunogenic portion of polypeptide disclosed herein; (ii) a polynucleotide encoding such a polypeptide; and (iii) an antigen-presenting cell that expressed such a polypeptide; and (b) administering to the patient an effective amount of the proliferated T cells, and thereby inhibiting the development of a cancer in the patient. Proliferated cells may, but need not, be cloned prior to administration to the patient.

[0035] Within further aspects, the present invention provides methods for determining the presence or absence of a cancer, preferably a colon cancer, in a patient comprising: (a) contacting a biological sample obtained from a patient with a binding agent that binds to a polypeptide as recited above; (b) detecting in the sample an amount of polypeptide that binds to the binding agent; and (c) comparing the amount of polypeptide with a predetermined cut-off value, and therefrom determining the presence or absence of a cancer in the patient. Within preferred embodiments, the binding agent is an antibody, more preferably a monoclonal antibody.

[0036] The present invention also provides, within other aspects, methods for monitoring the progression of a cancer in a patient. Such methods comprise the steps of: (a) contacting a biological sample obtained from a patient at a first point in time with a binding agent that binds to a polypeptide as recited above; (b) detecting in the sample an amount of polypeptide that binds to the binding agent; (c) repeating steps (a) and (b) using a biological sample obtained from the patient at a subsequent point in time; and (d) comparing the amount of polypeptide detected in step (c) with the amount detected in step (b) and therefrom monitoring the progression of the cancer in the patient.

[0037] The present invention further provides, within other aspects, methods for determining the presence or absence of a cancer in a patient, comprising the steps of: (a) contacting a biological sample obtained from a patient with an oligonucleotide that hybridizes to a polynucleotide that encodes a polypeptide of the present invention; (b) detecting in the sample a level of a polynucleotide, preferably mRNA, that hybridizes to the oligonucleotide; and (c) comparing the level of polynucleotide that hybridizes to the oligonucleotide with a predetermined cut-off value, and therefrom determining the presence or absence of a cancer in the patient. Within certain embodiments, the amount of mRNA is detected via polymerase chain reaction using, for example, at least one oligonucleotide primer that hybridizes to a polynucleotide encoding a polypeptide as recited above, or a complement of such a polynucleotide. Within other embodiments, the amount of mRNA is detected using a hybridization technique, employing an oligonucleotide probe that hybridizes to a polynucleotide that encodes a polypeptide as recited above, or a complement of such a polynucleotide.

[0038] In related aspects, methods are provided for monitoring the progression of a cancer in a patient, comprising the steps of: (a) contacting a biological sample obtained from a patient with an oligonucleotide that hybridizes to a polynucleotide that encodes a polypeptide of the present invention; (b) detecting in the sample an amount of a polynucleotide that hybridizes to the oligonucleotide; (c) repeating steps (a) and (b) using a biological sample obtained from the patient at a subsequent point in time; and (d) comparing the amount of polynucleotide detected in step (c) with the amount detected in step (b) and therefrom monitoring the progression of the cancer in the patient.

[0039] Within further aspects, the present invention provides antibodies, such as monoclonal antibodies, that bind to a polypeptide as described above, as well as diagnostic kits comprising such antibodies. Diagnostic kits comprising one or more oligonucleotide probes or primers as described above are also provided.

[0040] These and other aspects of the present invention will become apparent upon reference to the following detailed description. All references disclosed herein are hereby incorporated by reference in their entirety as if each was incorporated individually.

### BRIEF DESCRIPTION OF THE SEQUENCE IDENTIFIERS

[0041] SEQ ID NO:1 is the determined cDNA sequence for clone 62206_contig

[0042] SEQ ID NO:2 is the determined cDNA sequence for clone 62207.1

[0043] SEQ ID NO:3 is the determined cDNA sequence for clone 62209.2

[0044] SEQ ID NO:4 is the determined cDNA sequence for clone 62212.1

[0045] SEQ ID NO:5 is the determined cDNA sequence for clone 62213.1

[0046] SEQ ID NO:6 is the determined cDNA sequence for clone 62215.2

[0047] SEQ ID NO:7 is the determined cDNA sequence for clone 62216.1

[0048] SEQ ID NO:8 is the determined cDNA sequence for clone 62242.1

[0049] SEQ ID NO:9 is the determined cDNA sequence for clone 62250.2

[0050] SEQ ID NO:10 is the determined cDNA sequence for clone 62253_contig

[0051] SEQ ID NO:11 is the determined cDNA sequence for clone 62254.2

[0052] SEQ ID NO:12 is the determined cDNA sequence for clone 62255.1

[0053] SEQ ID NO:13 is the determined cDNA sequence for clone 62256.1

[0054] SEQ ID NO:14 is the determined cDNA sequence for clone 62259.1

[0055] SEQ ID NO:15 is the determined cDNA sequence for clone 62261_contig

[0056] SEQ ID NO:16 is the determined cDNA sequence for clone 62269.2

[0057] SEQ ID NO:17 is the determined cDNA sequence for clone 62275.1

[0058] SEQ ID NO:18 is the determined cDNA sequence for clone 62277.1

[0059] SEQ ID NO:19 is the determined cDNA sequence for clone 62279_contig

[0060] SEQ ID NO:20 is the determined cDNA sequence for clone 6228 1.1

[0061] SEQ ID NO:21 is the determined cDNA sequence for clone 62284.2

[0062] SEQ ID NO:22 is the determined cDNA sequence for clone 62285.2

[0063] SEQ ID NO:23 is the determined cDNA sequence for clone 62286.1

[0064] SEQ ID NO:24 is the determined cDNA sequence for clone 62287.1

[0065] SEQ ID NO:25 is the determined cDNA sequence for clone 62288.2

[0066] SEQ ID NO:26 is the determined cDNA sequence for clone 62290_contig

[0067] SEQ ID NO:27 is the determined cDNA sequence for clone 62292.2

[0068] SEQ ID NO:28 is the determined cDNA sequence for clone 62293.1

[0069] SEQ ID NO:29 is the determined cDNA sequence for clone 62294.1

[0070] SEQ ID NO:30 is the determined cDNA sequence for clone 62295.1

[0071] SEQ ID NO:31 is the determined cDNA sequence for clone 62296.1

[0072] SEQ ID NO:32 is the determined cDNA sequence for clone 62297.1

[0073] SEQ ID NO:33 is the determined cDNA sequence for clone 62298_contig

[0074] SEQ ID NO:34 is the determined cDNA sequence for clone 62301.2

[0075] SEQ ID NO:35 is the determined cDNA sequence for clone 62310.2

[0076] SEQ ID NO:36 is the determined cDNA sequence for clone 62313.2

[0077] SEQ ID NO:37 is the determined cDNA sequence for clone 62315.1

[0078] SEQ ID NO:38 is the determined cDNA sequence for clone 62316.2

[0079] SEQ ID NO:39 is the determined cDNA sequence for clone 62318.1

[0080] SEQ ID NO:40 is the determined cDNA sequence for clone 62323.2

[0081] SEQ ID NO:41 is the determined cDNA sequence for clone 62324.2

[0082] SEQ ID NO:42 is the determined cDNA sequence for clone 62329.1

[0083] SEQ ID NO:43 is the determined cDNA sequence for clone 62330.1

[0084] SEQ ID NO:44 is the determined cDNA sequence for clone 62333.1

[0085] SEQ ID NO:45 is the determined cDNA sequence for clone 63644_contig

[0086] SEQ ID NO:46 is the determined cDNA sequence for clone 63649.2

[0087] SEQ ID NO:47 is the determined cDNA sequence for clone 63650.1

[0088] SEQ ID NO:48 is the determined cDNA sequence for clone 63652.2

[0089] SEQ ID NO:49 is the determined cDNA sequence for clone 63658

[0090] SEQ ID NO:50 is the determined cDNA sequence for clone 63659.1

[0091] SEQ ID NO:51 is the determined cDNA sequence for clone 63661.1

[0092] SEQ ID NO:52 is the determined cDNA sequence for clone 63663.2

[0093] SEQ ID NO:53 is the determined cDNA sequence for clone 63666.1

[0094] SEQ ID NO:54 is the determined cDNA sequence for clone 63667.1

[0095] SEQ ID NO:55 is the determined cDNA sequence for clone 63668.2

[0096] SEQ ID NO:56 is the determined cDNA sequence for clone 63670.1

[0097] SEQ ID NO:57 is the determined cDNA sequence for clone 63672.1

[0098] SEQ ID NO:58 is the determined cDNA sequence for clone 63673.2

[0099] SEQ ID NO:59 is the determined cDNA sequence for clone 63675.2

[0100] SEQ ID NO:60 is the determined cDNA sequence for clone 63676.1

[0101] SEQ ID NO:61 is the determined cDNA sequence for clone 63677.1

[0102] SEQ ID NO:62 is the determined cDNA sequence for clone 63682.1

[0103] SEQ ID NO:63 is the determined cDNA sequence for clone 63683.2

[0104] SEQ ID NO:64 is the determined cDNA sequence for clone 63688.2

[0105] SEQ ID NO:65 is the determined cDNA sequence for clone 63693.2

[0106] SEQ ID NO:66 is the determined cDNA sequence for clone 63696.1

[0107] SEQ ID NO:67 is the determined cDNA sequence for clone 63697.2

[0108] SEQ ID NO:68 is the determined cDNA sequence for clone 63698.1

[0109] SEQ ID NO:69 is the determined cDNA sequence for clone 63949.2

[0110] SEQ ID NO:70 is the determined cDNA sequence for clone 63950.2

[0111] SEQ ID NO:71 is the determined cDNA sequence for clone 63956.2

[0112] SEQ ID NO:72 is the determined cDNA sequence for clone 62410.1

[0113] SEQ ID NO:73 is the determined cDNA sequence for clone 62412.1

[0114] SEQ ID NO:74 is the determined cDNA sequence for clone 62413.1

[0115] SEQ ID NO:75 is the determined cDNA sequence for clone 62414.1

[0116] SEQ ID NO:76 is the determined cDNA sequence for clone 62415.1

[0117] SEQ ID NO:77 is the determined cDNA sequence for clone 62416.1

[0118] SEQ ID NO:78 is the determined cDNA sequence for clone 62417.1

[0119] SEQ ID NO:79 is the determined cDNA sequence for clone 62418.1

[0120] SEQ ID NO:80 is the determined cDNA sequence for clone 62419.1

[0121] SEQ ID NO:81 is the determined cDNA sequence for clone 62420.1

[0122] SEQ ID NO:82 is the determined cDNA sequence for clone 6242 1.1

[0123] SEQ ID NO:83 is the determined cDNA sequence for clone 62422.1

[0124] SEQ ID NO:84 is the determined cDNA sequence for clone 62423.1

[0125] SEQ ID NO:85 is the determined cDNA sequence for clone 62424.1

[0126] SEQ ID NO:86 is the determined cDNA sequence for clone 62425.1

[0127] SEQ ID NO:87 is the determined cDNA sequence for clone 62426.1

[0128] SEQ ID NO:88 is the determined cDNA sequence for clone 62427.1

[0129] SEQ ID NO:89 is the determined cDNA sequence for clone 62429.1

[0130] SEQ ID NO:90 is the determined cDNA sequence for clone 62430.1

[0131] SEQ ID NO:91 is the determined cDNA sequence for clone 62431.1

[0132] SEQ ID NO:92 is the determined cDNA sequence for clone 62432.1

[0133] SEQ ID NO:93 is the determined cDNA sequence for clone 62433.1

[0134] SEQ ID NO:94 is the determined cDNA sequence for clone 62434.1

[0135] SEQ ID NO:95 is the determined cDNA sequence for clone 62435.1

[0136] SEQ ID NO:96 is the determined cDNA sequence for clone 62436.1

[0137] SEQ ID NO:97 is the determined cDNA sequence for clone 62437.1

[0138] SEQ ID NO:98 is the determined cDNA sequence for clone 62438.1

[0139] SEQ ID NO:99 is the determined cDNA sequence for clone 62439.1

[0140] SEQ ID NO:100 is the determined cDNA sequence for clone 62440.1

[0141] SEQ ID NO:101 is the determined cDNA sequence for clone 62441.1

[0142] SEQ ID NO:102 is the determined cDNA sequence for clone 62442.1

[0143] SEQ ID NO:103 is the determined cDNA sequence for clone 62443.1

[0144] SEQ ID NO:104 is the determined cDNA sequence for clone 62444.1

[0145] SEQ ID NO:105 is the determined cDNA sequence for clone 62445.1

[0146] SEQ ID NO:106 is the determined cDNA sequence for clone 62446.1

[0147] SEQ ID NO:107 is the determined cDNA sequence for clone 62448.1

[0148] SEQ ID NO:108 is the determined cDNA sequence for clone 62449.1

[0149] SEQ ID NO:109 is the determined cDNA sequence for clone 62450.1

[0150] SEQ ID NO:110 is the determined cDNA sequence for clone 62451.1

[0151] SEQ ID NO:111 is the determined cDNA sequence for clone 62452.1

[0152] SEQ ID NO:112 is the determined cDNA sequence for clone 62453.1

[0153] SEQ ID NO:113 is the determined cDNA sequence for clone 62454.1

[0154] SEQ ID NO:114 is the determined cDNA sequence for clone 62455.1

[0155] SEQ ID NO:115 is the determined cDNA sequence for clone 62456.1

[0156] SEQ ID NO:116 is the determined cDNA sequence for clone 62457.1

[0157] SEQ ID NO:117 is the determined cDNA sequence for clone 62460.1

[0158] SEQ ID NO:118 is the determined cDNA sequence for clone 62461.1

[0159] SEQ ID NO:119 is the determined cDNA sequence for clone 62462.1

[0160] SEQ ID NO:120 is the determined cDNA sequence for clone 62464.1

[0161] SEQ ID NO:121 is the determined cDNA sequence for clone 62465.1

[0162] SEQ ID NO:122 is the determined cDNA sequence for clone 62467.1

[0163] SEQ ID NO:123 is the determined cDNA sequence for clone 62468.1

[0164] SEQ ID NO:124 is the determined cDNA sequence for clone 62469.1

[0165] SEQ ID NO:125 is the determined cDNA sequence for clone 62470.1

[0166] SEQ ID NO:126 is the determined cDNA sequence for clone 62471.1

[0167] SEQ ID NO:127 is the determined cDNA sequence for clone 62472.1

[0168] SEQ ID NO:128 is the determined cDNA sequence for clone 62473.1

[0169] SEQ ID NO:129 is the determined cDNA sequence for clone 62474.1

[0170] SEQ ID NO:130 is the determined cDNA sequence for clone 62475.1

[0171] SEQ ID NO:131 is the determined cDNA sequence for clone 62476.1

[0172] SEQ ID NO:132 is the determined cDNA sequence for clone 62477.1

[0173] SEQ ID NO:133 is the determined cDNA sequence for clone 62478.1

[0174] SEQ ID NO:134 is the determined cDNA sequence for clone 62479.1

[0175] SEQ ID NO:135 is the determined cDNA sequence for clone 62480.1

[0176] SEQ ID NO:136 is the determined cDNA sequence for clone 62481.1

[0177] SEQ ID NO:137 is the determined cDNA sequence for clone 62482.1

[0178] SEQ ID NO:138 is the determined cDNA sequence for clone 62483.1

[0179] SEQ ID NO:139 is the determined cDNA sequence for clone 62484.1

[0180] SEQ ID NO:140 is the determined cDNA sequence for clone 62485.1

[0181] SEQ ID NO:141 is the determined cDNA sequence for clone 62486.1

[0182] SEQ ID NO:142 is the determined cDNA sequence for clone 62487.1

[0183] SEQ ID NO:143 is the determined cDNA sequence for clone 62488.1

[0184] SEQ ID NO:144 is the determined cDNA sequence for clone 62489.1

[0185] SEQ ID NO:145 is the determined cDNA sequence for clone 62490.1

[0186] SEQ ID NO:146 is the determined cDNA sequence for clone 62491.1

[0187] SEQ ID NO:147 is the determined cDNA sequence for clone 62492.1

[0188] SEQ ID NO:148 is the determined cDNA sequence for clone 62493.1

[0189] SEQ ID NO:149 is the determined cDNA sequence for clone 62494.1

[0190] SEQ ID NO:150 is the determined cDNA sequence for clone 62495.1

[0191] SEQ ID NO:151 is the determined cDNA sequence for clone 62496.1

[0192] SEQ ID NO:152 is the determined cDNA sequence for clone 62497.1

[0193] SEQ ID NO:153 is the determined cDNA sequence for clone 62498.1

[0194] SEQ ID NO:154 is the determined cDNA sequence for clone 62499.1

[0195] SEQ ID NO:155is the determined cDNA sequence for clone Contig_{—}133_{—}62500

[0196] SEQ ID NO:156 is the determined cDNA sequence for clone 62501

[0197] SEQ ID NO:157 is the determined cDNA sequence for clone 62502.1

[0198] SEQ ID NO:158 is the determined cDNA sequence for clone 62503.1

[0199] SEQ ID NO:159 is the determined cDNA sequence for clone 62504.1

[0200] SEQ ID NO:160 is the determined cDNA sequence for clone 62505.1

[0201] SEQ ID NO:161 is the determined cDNA sequence for clone 62506.1

[0202] SEQ ID NO:162 is the determined cDNA sequence for clone 62507.1

[0203] SEQ ID NO:163 is the determined cDNA sequence for clone 62508.1

[0204] SEQ ID NO:164 is the determined cDNA sequence for clone 62509.1

[0205] SEQ ID NO:165 is the determined cDNA sequence for clone 62510.1

[0206] SEQ ID NO:166 is the determined cDNA sequence for clone 62511.1

[0207] SEQ ID NO:167 is the determined cDNA sequence for clone 62512.1

[0208] SEQ ID NO:168 is the determined cDNA sequence for clone 62513.1

[0209] SEQ ID NO:169 is the determined cDNA sequence for clone 62514.1

[0210] SEQ ID NO:170 is the determined cDNA sequence for clone 62515.1

[0211] SEQ ID NO:171 is the determined cDNA sequence for clone 62516.1

[0212] SEQ ID NO:172 is the determined cDNA sequence for clone 62517

[0213] SEQ ID NO:173 is the determined cDNA sequence for clone 62518.1

[0214] SEQ ID NO:174 is the determined cDNA sequence for clone 62519.1

[0215] SEQ ID NO:175 is the determined cDNA sequence for clone 62520.1

[0216] SEQ ID NO:176 is the determined cDNA sequence for clone 62521.1

[0217] SEQ ID NO:177 is the determined cDNA sequence for clone 62522.1

[0218] SEQ ID NO:178 is the determined cDNA sequence for clone 62524.1

[0219] SEQ ID NO:179 is the determined cDNA sequence for clone 62525.1

[0220] SEQ ID NO:180 is the determined cDNA sequence for clone Contig_{—}146_{—}62526

[0221] SEQ ID NO:181 is the determined cDNA sequence for clone 62527.1

[0222] SEQ ID NO:182 is the determined cDNA sequence for clone 62528.1

[0223] SEQ ID NO:183 is the determined cDNA sequence for clone 62529.1

[0224] SEQ ID NO:184 is the determined cDNA sequence for clone 62530.1

[0225] SEQ ID NO:185 is the determined cDNA sequence for clone 62531.1

[0226] SEQ ID NO:186 is the determined cDNA sequence for clone 62532.1

[0227] SEQ ID NO:187 is the determined cDNA sequence for clone 62533.1

[0228] SEQ ID NO:188 is the determined cDNA sequence for clone 62534.1

[0229] SEQ ID NO:189 is the determined cDNA sequence for clone 62535.1

[0230] SEQ ID NO:190is the determined cDNA sequence for clone Contig_{—}213_{—}62536

[0231] SEQ ID NO:191 is the determined cDNA sequence for clone 62537

[0232] SEQ ID NO:192 is the determined cDNA sequence for clone 62538.1

[0233] SEQ ID NO:193 is the determined cDNA sequence for clone 62539.1

[0234] SEQ ID NO:1 94 is the determined cDNA sequence for clone 62540.1

[0235] SEQ ID NO:195 is the determined cDNA sequence for clone 62541.1

[0236] SEQ ID NO:196 is the determined cDNA sequence for clone 62542.1

[0237] SEQ ID NO:197 is the determined cDNA sequence for clone 62543.1

[0238] SEQ ID NO:198 is the determined cDNA sequence for clone Contig_{—}62_{—}62544

[0239] SEQ ID NO:199 is the determined cDNA sequence for clone 62545.1

[0240] SEQ ID NO:200 is the determined cDNA sequence for clone 62547.1

[0241] SEQ ID NO:201 is the determined cDNA sequence for clone 62548.1

[0242] SEQ ID NO:202 is the determined cDNA sequence for clone 62549.1

[0243] SEQ ID NO:203 is the determined cDNA sequence for clone 62550.1

[0244] SEQ ID NO:204 is the determined cDNA sequence for clone 62551.1

[0245] SEQ ID NO:205 is the determined cDNA sequence for clone 62553.1

[0246] SEQ ID NO:206 is the determined cDNA sequence for clone 62554.1

[0247] SEQ ID NO:207 is the determined cDNA sequence for clone 62555.1

[0248] SEQ ID NO:208 is the determined cDNA sequence for clone 62556.1

[0249] SEQ ID NO:209 is the determined cDNA sequence for clone 62557.1

[0250] SEQ ID NO:210 is the determined cDNA sequence for clone 62558.1

[0251] SEQ ID NO:211 is the determined cDNA sequence for clone 62559.1

[0252] SEQ ID NO:212 is the determined cDNA sequence for clone 62560.1

[0253] SEQ ID NO:213 is the determined cDNA sequence for clone 62561.1

[0254] SEQ ID NO:214 is the determined cDNA sequence for clone 62562.1

[0255] SEQ ID NO:215 is the determined cDNA sequence for clone 62563.1

[0256] SEQ ID NO:216 is the determined cDNA sequence for clone Contig_{—}193_{—}62564

[0257] SEQ ID NO:217 is the determined cDNA sequence for clone 62565.1

[0258] SEQ ID NO:218 is the determined cDNA sequence for clone 62566.1

[0259] SEQ ID NO:219 is the determined cDNA sequence for clone 62567.1

[0260] SEQ ID NO:220 is the determined cDNA sequence for clone 62568.1

[0261] SEQ ID NO:221 is the determined cDNA sequence for clone 62569.1

[0262] SEQ ID NO:222 is the determined cDNA sequence for clone 62570.1

[0263] SEQ ID NO:223 is the determined cDNA sequence for clone 62571.1

[0264] SEQ ID NO:224 is the determined cDNA sequence for clone 62572.1

[0265] SEQ ID NO:225 is the determined cDNA sequence for clone Contig_{—}198_{—}62573

[0266] SEQ ID NO:226 is the determined cDNA sequence for clone 62574.1

[0267] SEQ ID NO:227 is the determined cDNA sequence for clone 62575.1

[0268] SEQ ID NO:228 is the determined cDNA sequence for clone 62576.1

[0269] SEQ ID NO:229 is the determined cDNA sequence for clone 62577.1

[0270] SEQ ID NO:230 is the determined cDNA sequence for clone 62578.1

[0271] SEQ ID NO:231 is the determined cDNA sequence for clone 62579.1

[0272] SEQ ID NO:232 is the determined cDNA sequence for clone 62581.1

[0273] SEQ ID NO:233 is the determined cDNA sequence for clone 62582.1

[0274] SEQ ID NO:234 is the determined cDNA sequence for clone 62583.1

[0275] SEQ ID NO:235 is the determined cDNA sequence for clone 62585.1

[0276] SEQ ID NO:236 is the determined cDNA sequence for clone 62587.1

[0277] SEQ ID NO:237 is the determined cDNA sequence for clone 62589.1

[0278] SEQ ID NO:238 is the determined cDNA sequence for clone 62590.1

[0279] SEQ ID NO:239 is the determined cDNA sequence for clone 62591.1

[0280] SEQ ID NO:240 is the determined cDNA sequence for clone Contig_{—}207_{—}62592

[0281] SEQ ID NO:241 is the determined cDNA sequence for clone Contig_{—}18_{—}62593

[0282] SEQ ID NO:242 is the determined cDNA sequence for clone 62594.1

[0283] SEQ ID NO:243 is the determined cDNA sequence for clone 62595.1

[0284] SEQ ID NO:244 is the determined cDNA sequence for clone 62596.1

[0285] SEQ ID NO:245 is the determined cDNA sequence for clone 62597.1

[0286] SEQ ID NO:246 is the determined cDNA sequence for clone 62598.1

[0287] SEQ ID NO:247 is the determined cDNA sequence for clone 62599.1

[0288] SEQ ID NO:248 is the determined cDNA sequence for clone 62600.1

[0289] SEQ ID NO:249 is the determined cDNA sequence for clone 62601.1

[0290] SEQ ID NO:250 is the determined cDNA sequence for clone 62602.1

[0291] SEQ ID NO:251 is the determined cDNA sequence for clone 62603.1

[0292] SEQ ID NO:252 is the determined cDNA sequence for clone 62604.1

[0293] SEQ ID NO:253 is the determined cDNA sequence for clone 62605.1

[0294] SEQ ID NO:254 is the determined cDNA sequence for clone 62606.1

[0295] SEQ ID NO:255 is the determined cDNA sequence for clone 62607.1

[0296] SEQ ID NO:256 is the determined cDNA sequence for clone 62608.1

[0297] SEQ ID NO:257 is the determined cDNA sequence for clone 62609.1

[0298] SEQ ID NO:258 is the determined cDNA sequence for clone 62610.1

[0299] SEQ ID NO:259 is the determined cDNA sequence for clone 62611.1

[0300] SEQ ID NO:260 is the determined cDNA sequence for clone 62613.1

[0301] SEQ ID NO:261 is the determined cDNA sequence for clone 62614.1

[0302] SEQ ID NO:262 is the determined cDNA sequence for clone 62615.1

[0303] SEQ ID NO:263 is the determined cDNA sequence for clone 62616.1

[0304] SEQ ID NO:264 is the determined cDNA sequence for clone 62617.1

[0305] SEQ ID NO:265 is the determined cDNA sequence for clone 62618.1

[0306] SEQ ID NO:266 is the determined cDNA sequence for clone 62620.1

[0307] SEQ ID NO:267 is the determined cDNA sequence for clone 62621.1

[0308] SEQ ID NO:268 is the determined cDNA sequence for clone 62622.1

[0309] SEQ ID NO:269 is the determined cDNA sequence for clone 62623.1

[0310] SEQ ID NO:270 is the determined cDNA sequence for clone 62624.1

[0311] SEQ ID NO:271 is the determined cDNA sequence for clone 62625.1

[0312] SEQ ID NO:272 is the determined cDNA sequence for clone 62626.1

[0313] SEQ ID NO:273 is the determined cDNA sequence for clone 62627.1

[0314] SEQ ID NO:274 is the determined cDNA sequence for clone 62628.1

[0315] SEQ ID NO:275 is the determined cDNA sequence for clone 62629.1

[0316] SEQ ID NO:276 is the determined cDNA sequence for clone 62630.1

[0317] SEQ ID NO:277 is the determined cDNA sequence for clone 62631.1

[0318] SEQ ID NO:278 is the determined cDNA sequence for clone 62632.1

[0319] SEQ ID NO:279 is the determined cDNA sequence for clone 62633.1

[0320] SEQ ID NO:280 is the determined cDNA sequence for clone 62634.1

[0321] SEQ ID NO:281 is the determined cDNA sequence for clone 62635.1

[0322] SEQ ID NO:282 is the determined cDNA sequence for clone 62636.1

[0323] SEQ ID NO:283 is the determined cDNA sequence for clone 62637.1

[0324] SEQ ID NO:284 is the determined cDNA sequence for clone 62638.1

[0325] SEQ ID NO:285 is the determined cDNA sequence for clone Contig_{—}131_{—}62639

[0326] SEQ ID NO:286 is the determined cDNA sequence for clone 62640.1

[0327] SEQ ID NO:287 is the determined cDNA sequence for clone 62641.1

[0328] SEQ ID NO:288 is the determined cDNA sequence for clone 62642.1

[0329] SEQ ID NO:289 is the determined cDNA sequence for clone 62643.1

[0330] SEQ ID NO:290 is the determined cDNA sequence for clone 62644.1

[0331] SEQ ID NO:291 is the determined cDNA sequence for clone 62645.1

[0332] SEQ ID NO:292 is the determined cDNA sequence for clone 62646.1

[0333] SEQ ID NO:293 is the determined cDNA sequence for clone 62647.1

[0334] SEQ ID NO:294 is the determined cDNA sequence for clone 62648.1

[0335] SEQ ID NO:295 is the determined cDNA sequence for clone 62649.1

[0336] SEQ ID NO:296 is the determined cDNA sequence for clone 62650.1

[0337] SEQ ID NO:297 is the determined cDNA sequence for clone 62651.1

[0338] SEQ ID NO:298 is the determined cDNA sequence for clone 62652.1

[0339] SEQ ID NO:299 is the determined cDNA sequence for clone 62653.1

[0340] SEQ ID NO:300 is the determined cDNA sequence for clone 62654.1

[0341] SEQ ID NO:301 is the determined cDNA sequence for clone 62655.1

[0342] SEQ ID NO:302 is the determined cDNA sequence for clone 62656.1

[0343] SEQ ID NO:303 is the determined cDNA sequence for clone 62657.1

[0344] SEQ ID NO:304 is the determined cDNA sequence for clone 62658.1

[0345] SEQ ID NO:305 is the determined cDNA sequence for clone 62659.1

[0346] SEQ ID NO:306 is the determined cDNA sequence for clone 62660.1

[0347] SEQ ID NO:307 is the determined cDNA sequence for clone 62661.1

[0348] SEQ ID NO:308 is the determined cDNA sequence for clone 62662.1

[0349] SEQ ID NO:309 is the determined cDNA sequence for clone 62663.1

[0350] SEQ ID NO:310 is the determined cDNA sequence for clone 62664.1

[0351] SEQ ID NO:311 is the determined cDNA sequence for clone 62665.1

[0352] SEQ ID NO:312 is the determined cDNA sequence for clone 62666.1

[0353] SEQ ID NO:313 is the determined cDNA sequence for clone 62667.1

[0354] SEQ ID NO:314 is the determined cDNA sequence for clone 62668.1

[0355] SEQ ID NO:315 is the determined cDNA sequence for clone 62669.1

[0356] SEQ ID NO:316 is the determined cDNA sequence for clone 62670.1

[0357] SEQ ID NO:317 is the determined cDNA sequence for clone 62671.1

[0358] SEQ ID NO:318 is the determined cDNA sequence for clone 62672.1

[0359] SEQ ID NO:319 is the determined cDNA sequence for clone 62673.1

[0360] SEQ ID NO:320 is the determined cDNA sequence for clone 62674.1

[0361] SEQ ID NO:321 is the determined cDNA sequence for clone 62675.1

[0362] SEQ ID NO:322 is the determined cDNA sequence for clone 62676.1

[0363] SEQ ID NO:323 is the determined cDNA sequence for clone 62677.1

[0364] SEQ ID NO:324 is the determined cDNA sequence for clone 62678.1

[0365] SEQ ID NO:325 is the determined cDNA sequence for clone 62679.1

[0366] SEQ ID NO:326 is the determined cDNA sequence for clone 62680.1

[0367] SEQ ID NO:327 is the determined cDNA sequence for clone 62681.1

[0368] SEQ ID NO:328 is the determined cDNA sequence for clone 62682.1

[0369] SEQ ID NO:329 is the determined cDNA sequence for clone 62683.1

[0370] SEQ ID NO:330 is the determined cDNA sequence for clone 62684.1

[0371] SEQ ID NO:331 is the determined cDNA sequence for clone 62685.1

[0372] SEQ ID NO:332 is the determined cDNA sequence for clone 62686.1

[0373] SEQ ID NO:333 is the determined cDNA sequence for clone 62687.1

[0374] SEQ ID NO:334 is the determined cDNA sequence for clone 62688.1

[0375] SEQ ID NO:335 is the determined cDNA sequence for clone 62689.1

[0376] SEQ ID NO:336 is the determined cDNA sequence for clone 62690.1

[0377] SEQ ID NO:337 is the determined cDNA sequence for clone 62691.1

[0378] SEQ ID NO:338 is the determined cDNA sequence for clone 62692.1

[0379] SEQ ID NO:339 is the determined cDNA sequence for clone 62693.1

[0380] SEQ ID NO:340 is the determined cDNA sequence for clone 62694.1

[0381] SEQ ID NO:341 is the determined cDNA sequence for clone 62695.1

[0382] SEQ ID NO:342 is the determined cDNA sequence for clone 62696.1

[0383] SEQ ID NO:343 is the determined cDNA sequence for clone 62697.1

[0384] SEQ ID NO:344 is the determined cDNA sequence for clone 62722.1

[0385] SEQ ID NO:345 is the determined cDNA sequence for clone 62725.1

[0386] SEQ ID NO:346 is the determined cDNA sequence for clone 62728.1

[0387] SEQ ID NO:347 is the determined cDNA sequence for clone 62729.1

[0388] SEQ ID NO:348 is the determined cDNA sequence for clone 62731.1

[0389] SEQ ID NO:349 is the determined cDNA sequence for clone 67663.3_{—}

[0390] SEQ ID NO:350 is the determined cDNA sequence for clone 67664.3_{—}

[0391] SEQ ID NO:351 is the determined cDNA sequence for clone 67665.4_{—}

[0392] SEQ ID NO:352 is the determined cDNA sequence for clone C615S_{—}63676

[0393] SEQ ID NO:353 is the determined cDNA sequence for clone C616S_{—}63949

[0394] SEQ ID NO:354 is the determined cDNA sequence for clone C617S_{—}62290

[0395] SEQ ID NO:355 is the determined cDNA sequence for clone C618S_{—}63693

[0396] SEQ ID NO:356 is the determined cDNA sequence for clone C619S_{—}62293

[0397] SEQ ID NO:357 is the determined cDNA sequence for clone C620S_{—}63677

[0398] SEQ ID NO:358 is the determined cDNA sequence for clone C621S_{—}62294

[0399] SEQ ID NO:359 is the determined cDNA sequence for clone C622S_{—}63659

[0400] SEQ ID NO:360 is the determined cDNA sequence for clone C623S_{—}62301

[0401] SEQ ID NO:361 is the determined cDNA sequence for clone C624S_{—}63663

[0402] SEQ ID NO:362 is the determined cDNA sequence for clone C625S_{—}62324

[0403] SEQ ID NO:363 is the determined cDNA sequence for clone C626S_{—}62213

[0404] SEQ ID NO:364 is the determined cDNA sequence for clone

[0405] FLJ21409_fis_clone_COL03924.seq_related_to_C618S_{—}63693

[0406] SEQ ID NO:365 is the determined cDNA sequence for clone

[0407] Human_eukaryotic_initiation_factor_{—}4E.seq_related_to_C624S_{—}63663

[0408] SEQ ID NO:366 is the determined cDNA sequence for clone

[0409] KIAA0905.seq_related_to_C622S_{—}63659

[0410] SEQ ID NO:367 is the determined cDNA sequence for clone

[0411] p35_CAK1_associated_protein.seq_related_to_C616S_{—}63949

[0412] SEQ ID NO:368 is the determined cDNA sequence for clone

[0413] L6_Human_Tumor_Antigen.seq_related_to_C620S_{—}63677

[0414] SEQ ID NO:369 is the determined cDNA sequence for clone

[0415] ARF_GTPase_activating_protein_GIT1.seq_related_to_C621S_{—}62294

[0416] SEQ ID NO:370 is the determined cDNA sequence for clone

[0417] KIAA0104.seq_related_to_CC615S_{—}63676

[0418] SEQ ID NO:371 is the determined cDNA sequence for clone 62218571 R0374:A05

[0419] SEQ ID NO:372 is the determined cDNA sequence for clone 62218572 R0374:A06

[0420] SEQ ID NO:373 is the determined cDNA sequence for clone 62218575 R0374:A09

[0421] SEQ ID NO:374 is the determined cDNA sequence for clone 62218577 R0374:A11

[0422] SEQ ID NO:375 is the determined cDNA sequence for clone 62218578 R0374:A12

[0423] SEQ ID NO:376 is the determined cDNA sequence for clone 62218579 R0374:B01

[0424] SEQ ID NO:377 is the determined cDNA sequence for clone 62218580 R0374:B02

[0425] SEQ ID NO:378 is the deter-mined cDNA sequence for clone 62218582 R0374:B4

[0426] SEQ ID NO:379 is the determined cDNA sequence for clone 62218585 R0374:B07

[0427] SEQ ID NO:380 is the determined cDNA sequence for clone 62218586 R0374:B08

[0428] SEQ ID NO:381 is the determined cDNA sequence for clone 62218587 R0374:B09

[0429] SEQ ID NO:382 is the determined cDNA sequence for clone 62218588 R0374:B10

[0430] SEQ ID NO:383 is the determined cDNA sequence for clone 62218591 R0374:C01

[0431] SEQ ID NO:384 is the determined cDNA sequence for clone 62218592 R0374:C02

[0432] SEQ ID NO:385 is the determined cDNA sequence for clone 62218593 R0374:C03

[0433] SEQ ID NO:386 is the determined cDNA sequence for clone 62218594 R0374:C04

[0434] SEQ ID NO:387 is the determined cDNA sequence for clone 62218595 R0374:C05

[0435] SEQ ID NO:388 is the determined cDNA sequence for clone 62218596 R0374:C06

[0436] SEQ ID NO:389 is the determined cDNA sequence for clone 62218597 R0374:C07

[0437] SEQ ID NO:390 is the determined cDNA sequence for clone 62218598 R0374:C08

[0438] SEQ ID NO:391 is the determined cDNA sequence for clone 62218599 R0374:C09

[0439] SEQ ID NO:392 is the determined cDNA sequence for clone 62218600 R0374:C10

[0440] SEQ ID NO:393 is the determined cDNA sequence for clone 62218601 R0374:C11

[0441] SEQ ID NO:394 is the determined cDNA sequence for clone 62218603 R0374:D01

[0442] SEQ ID NO:395 is the determined cDNA sequence for clone 62218604 R0374:D02

[0443] SEQ ID NO:396 is the determined cDNA sequence for clone 62218605 R0374:D03

[0444] SEQ ID NO:397 is the determined cDNA sequence for clone 62218607 R0374:D05

[0445] SEQ ID NO:398 is the determined cDNA sequence for clone 62218609 R0374:D07

[0446] SEQ ID NO:399 is the determined cDNA sequence for clone 62218611 R0374:D09

[0447] SEQ ID NO:400 is the determined cDNA sequence for clone 62218612 R0374:D10

[0448] SEQ ID NO:401 is the determined cDNA sequence for clone 62218613 R0374:D11

[0449] SEQ ID NO:402 is the determined cDNA sequence for clone 62218614 R0374:D12

[0450] SEQ ID NO:403 is the determined cDNA sequence for clone 62218615 R0374:E01

[0451] SEQ ID NO:404 is the determined cDNA sequence for clone 62218617 R0374:E03

[0452] SEQ ID NO:405 is the determined cDNA sequence for clone 62218618 R0374:E04

[0453] SEQ ID NO:406 is the determined cDNA sequence for clone 62218619 R0374:E05

[0454] SEQ ID NO:407 is the determined cDNA sequence for clone 62218620 R0374:E06

[0455] SEQ ID NO:408 is the determined cDNA sequence for clone 62218621 R0374:E07

[0456] SEQ ID NO:409 is the determined cDNA sequence for clone 62218622 R0374:E08

[0457] SEQ ID NO:410 is the determined cDNA sequence for clone 62218623 R0374:E09

[0458] SEQ ID NO:411 is the determined cDNA sequence for clone 62218624 R0374:E10

[0459] SEQ ID NO:412 is the determined cDNA sequence for clone 62218625 R0374:E11

[0460] SEQ ID NO:413 is the determined cDNA sequence for clone 62218626 R0374:E12

[0461] SEQ ID NO:414 is the determined cDNA sequence for clone 62218627 R0374:F01

[0462] SEQ ID NO:415 is the determined cDNA sequence for clone 62218628 R0374:F02

[0463] SEQ ID NO:416 is the determined cDNA sequence for clone 62218629 R0374:F03

[0464] SEQ ID NO:417 is the determined cDNA sequence for clone 62218631 R0374:F05

[0465] SEQ ID NO:418 is the determined cDNA sequence for clone 62218632 R0374:F06

[0466] SEQ ID NO:419 is the determined cDNA sequence for clone 62218633 R0374:F07

[0467] SEQ ID NO:420 is the determined cDNA sequence for clone 62218634 R0374:F08

[0468] SEQ ID NO:421 is the determined cDNA sequence for clone 62218635 R0374:F:09

[0469] SEQ ID NO:422 is the determined cDNA sequence for clone 62218636 R0374:F10

[0470] SEQ ID NO:423 is the determined cDNA sequence for clone 62218638 R0374:F12

[0471] SEQ ID NO:424 is the determined cDNA sequence for clone 62218639 R0374:G01

[0472] SEQ ID NO:425 is the determined cDNA sequence for clone 62218640 R0374:G02

[0473] SEQ ID NO:426 is the determined cDNA sequence for clone 62218642 R0374:G04

[0474] SEQ ID NO:427 is the determined cDNA sequence for clone 62218643 R0374:G05

[0475] SEQ ID NO:428 is the determined cDNA sequence for clone 62218644 R0374: G06

[0476] SEQ ID NO:429 is the determined cDNA sequence for clone 62218645 R0374:G07

[0477] SEQ ID NO:430 is the determined cDNA sequence for clone 62218646 R0374:G08

[0478] SEQ ID NO:431 is the determined cDNA sequence for clone 62218647 R0374:G09

[0479] SEQ ID NO:432 is the determined cDNA sequence for clone 62218648 R0374:G10

[0480] SEQ ID NO:433 is the determined cDNA sequence for clone 62218649 R0374:G11

[0481] SEQ ID NO:434 is the determined cDNA sequence for clone 62218652 R0374:H02

[0482] SEQ ID NO:435 is the determined cDNA sequence for clone 62218653 R0374:H03

[0483] SEQ ID NO:436 is the determined cDNA sequence for clone 62218654 R0374:H04

[0484] SEQ ID NO:437 is the determined cDNA sequence for clone 62218655 R0374:H05

[0485] SEQ ID NO:438 is the determined cDNA sequence for clone 62218656 R0374:H06

[0486] SEQ ID NO:439 is the determined cDNA sequence for clone 62218657 R0374:H07

[0487] SEQ ID NO:440 is the determined cDNA sequence for clone 62218658 R0374:H:08

[0488] SEQ ID NO:441 is the determined cDNA sequence for clone 62218659 R0374:H09

[0489] SEQ ID NO:442 is the determined cDNA sequence for clone 62218660 R0374:H10

[0490] SEQ ID NO:443 is the determined cDNA sequence for clone 62218661 R0374:H11

[0491] SEQ ID NO:444 is the determined cDNA sequence for clone 62116844 R0375:A02

[0492] SEQ ID NO:445 is the determined cDNA sequence for clone 62116845 R0375:A03

[0493] SEQ ID NO:446 is the determined cDNA sequence for clone 62116847 R0375:A06

[0494] SEQ ID NO:447 is the determined cDNA sequence for clone 62116848 R0375:A07

[0495] SEQ ID NO:448 is the determined cDNA sequence for clone 62116849 R0375:A:08

[0496] SEQ ID NO:449 is the determined cDNA sequence for clone 62116850 R0375:A09

[0497] SEQ ID NO:450 is the determined cDNA sequence for clone 62116851 R0375:A10

[0498] SEQ ID NO:451 is the determined cDNA sequence for clone 62116853 R0375:A12

[0499] SEQ ID NO:452 is the determined cDNA sequence for clone 62116855 R0375:B02

[0500] SEQ ID NO:453 is the determined cDNA sequence for clone 62116856 R0375:B03

[0501] SEQ ID NO:454 is the determined cDNA sequence for clone 62116857 R0375:B04

[0502] SEQ ID NO:455 is the determined cDNA sequence for clone 62116858 R0375:B05

[0503] SEQ ID NO:456 is the determined cDNA sequence for clone 62116859 R0375:B06

[0504] SEQ ID NO:457 is the determined cDNA sequence for clone 62116860 R0375:B07

[0505] SEQ ID NO:458 is the determined cDNA sequence for clone 62116861 R0375:B08

[0506] SEQ ID NO:459 is the determined cDNA sequence for clone 62116862 R0375:B09

[0507] SEQ ID NO:460 is the determined cDNA sequence for clone 62116863 R0375:B10

[0508] SEQ ID NO:461 is the determined cDNA sequence for clone 62116866 R0375:C01

[0509] SEQ ID NO:462 is the determined cDNA sequence for clone 62116867 R0375:C02

[0510] SEQ ID NO:463 is the determined cDNA sequence for clone 62116868 R0375:C03

[0511] SEQ ID NO:464 is the determined cDNA sequence for clone 62116869 R0375:C04

[0512] SEQ ID NO:465 is the determined cDNA sequence for clone 62116870 R0375:C05

[0513] SEQ ID NO:466 is the determined cDNA sequence for clone 62116872 R0375:C07

[0514] SEQ ID NO:467 is the determined cDNA sequence for clone 62116873 R0375:C08

[0515] SEQ ID NO:468 is the determined cDNA sequence for clone 62116874 R0375:C09

[0516] SEQ ID NO:469 is the determined cDNA sequence for clone 62116875 R0375:C10

[0517] SEQ ID NO:470 is the determined cDNA sequence for clone 62116876 R0375:C11

[0518] SEQ ID NO:471 is the determined cDNA sequence for clone 62116877 R0375:C12

[0519] SEQ ID NO:472 is the determined cDNA sequence for clone 62116879 R0375:D02

[0520] SEQ ID NO:473 is the determined cDNA sequence for clone 62116880 R0375:D03

[0521] SEQ ID NO:474 is the determined cDNA sequence for clone 62116881 R0375:D04

[0522] SEQ ID NO:475 is the determined cDNA sequence for clone 62116882 R0375:D05

[0523] SEQ ID NO:476 is the determined cDNA sequence for clone 62116883 R0375:D06

[0524] SEQ ID NO:477 is the determined cDNA sequence for clone 62116884 R0375:D07

[0525] SEQ ID NO:478 is the determined cDNA sequence for clone 62116885 R0375:D08

[0526] SEQ ID NO:479 is the determined cDNA sequence for clone 62116886 R0375:D09

[0527] SEQ ID NO:480 is the determined cDNA sequence for clone 62116887 R0375:D10

[0528] SEQ ID NO:481 is the determined cDNA sequence for clone 62116888 R0375:D11

[0529] SEQ ID NO:482 is the determined cDNA sequence for clone 62116890 R0375:E01

[0530] SEQ ID NO:483 is the determined cDNA sequence for clone 62116891 R0375:E02

[0531] SEQ ID NO:484 is the determined cDNA sequence for clone 62116892 R0375:E03

[0532] SEQ ID NO:485 is the determined cDNA sequence for clone 62116893 R0375:E04

[0533] SEQ ID NO:486 is the determined cDNA sequence for clone 62116894 R0375:E05

[0534] SEQ ID NO:487 is the determined cDNA sequence for clone 62116895 R0375:E06

[0535] SEQ ID NO:488 is the determined cDNA sequence for clone 62116896 R0375:E07

[0536] SEQ ID NO:489 is the determined cDNA sequence for clone 62116897 R0375:E08

[0537] SEQ ID NO:490 is the determined cDNA sequence for clone 62116900 R0375:E11

[0538] SEQ ID NO:491 is the determined cDNA sequence for clone 62116901 R0375:E12

[0539] SEQ ID NO:492 is the determined cDNA sequence for clone 62116902 R0375:F01

[0540] SEQ ID NO:493 is the determined cDNA sequence for clone 62116904 R0375:F03

[0541] SEQ ID NO:494 is the determined cDNA sequence for clone 62116905 R0375:F04

[0542] SEQ ID NO:495 is the determined cDNA sequence for clone 62116906 R0375:F05

[0543] SEQ ID NO:496 is the determined cDNA sequence for clone 62116907 R0375:F06

[0544] SEQ ID NO:497 is the determined cDNA sequence for clone 62116908 R0375:F07

[0545] SEQ ID NO:498 is the determined cDNA sequence for clone 62116909 R0375:F08

[0546] SEQ ID NO:499 is the determined cDNA sequence for clone 62116912 R0375:F11

[0547] SEQ ID NO:500 is the determined cDNA sequence for clone 62116913 R0375:F12

[0548] SEQ ID NO:501 is the determined cDNA sequence for clone 62116914 R0375:G01

[0549] SEQ ID NO:502 is the determined cDNA sequence for clone 62116915 R0375:G02

[0550] SEQ ID NO:503 is the determined cDNA sequence for clone 62116916 R0375:G03

[0551] SEQ ID NO:504 is the determined cDNA sequence for clone 62116917 R0375:G04

[0552] SEQ ID NO:505 is the determined cDNA sequence for clone 62116918 R0375:G:05

[0553] SEQ ID NO:506 is the determined cDNA sequence for clone 62116919 R0375:G06

[0554] SEQ ID NO:507 is the determined cDNA sequence for clone 62116920 R0375:G07

[0555] SEQ ID NO:508 is the determined cDNA sequence for clone 62116921 R0375:G08

[0556] SEQ ID NO:509 is the determined cDNA sequence for clone 62116922 R0375:G09

[0557] SEQ ID NO:510 is the determined cDNA sequence for clone 62116923 R0375:G10

[0558] SEQ ID NO:511 is the determined cDNA sequence for clone 62116924 R0375:G11

[0559] SEQ ID NO:512 is the determined cDNA sequence for clone 62116925 R0375:G12

[0560] SEQ ID NO:513 is the determined cDNA sequence for clone 62116926 R0375:H01

[0561] SEQ ID NO:514 is the determined cDNA sequence for clone 62116928 R0375:H03

[0562] SEQ ID NO:515 is the determined cDNA sequence for clone 62116929 R0375:H04

[0563] SEQ ID NO:516 is the determined cDNA sequence for clone 62116930 R0375:H05

[0564] SEQ ID NO:517 is the determined cDNA sequence for clone 62116931 R0375:H06

[0565] SEQ ID NO:518 is the determined cDNA sequence for clone 62116934 R0375:H09

[0566] SEQ ID NO:519 is the determined cDNA sequence for clone 62116935 R0375:H10

[0567] SEQ ID NO:520 is the determined cDNA sequence for clone 62116937 R0376:A02

[0568] SEQ ID NO:521 is the determined cDNA sequence for clone 62116939 R0376:A05

[0569] SEQ ID NO:522 is the determined cDNA sequence for clone 62116940 R0376:A06

[0570] SEQ ID NO:523 is the determined cDNA sequence for clone 62116942 R0376:A08

[0571] SEQ ID NO:524 is the determined cDNA sequence for clone 62116943 R0376:A09

[0572] SEQ ID NO:525 is the determined cDNA sequence for clone 62116944 R0376:A10

[0573] SEQ ID NO:526 is the determined cDNA sequence for clone 62116946 R0376:A12

[0574] SEQ ID NO:527 is the determined cDNA sequence for clone 62116948 R0376:B02

[0575] SEQ ID NO:528 is the determined cDNA sequence for clone 62116949 R0376:B03

[0576] SEQ ID NO:529 is the determined cDNA sequence for clone 62116950 R0376:B04

[0577] SEQ ID NO:530 is the determined cDNA sequence for clone 62116951 R0376:B:05

[0578] SEQ ID NO:531 is the determined cDNA sequence for clone 62116952 R0376:B06

[0579] SEQ ID NO:532 is the determined cDNA sequence for clone 62116953 R0376:B07

[0580] SEQ ID NO:533 is the determined cDNA sequence for clone 62116954 R0376:B08

[0581] SEQ ID NO:534 is the determined cDNA sequence for clone 62116956 R0376:B10

[0582] SEQ ID NO:535 is the determined cDNA sequence for clone 62116957 R0376:B11

[0583] SEQ ID NO:536 is the determined cDNA sequence for clone 62116958 R0376:B12

[0584] SEQ ID NO:537 is the determined cDNA sequence for clone 62116959 R0376:C01

[0585] SEQ ID NO:538 is the determined cDNA sequence for clone 62116960 R0376:C02

[0586] SEQ ID NO:539 is the determined cDNA sequence for clone 62116961 R0376:C03

[0587] SEQ ID NO:540 is the determined cDNA sequence for clone 62116962 R0376:C04

[0588] SEQ ID NO:541 is the determined cDNA sequence for clone 62116963 R0376:C05

[0589] SEQ ID NO:542 is the determined cDNA sequence for clone 62116964 R0376:C06

[0590] SEQ ID NO:543 is the determined cDNA sequence for clone 62116965 R0376:C07

[0591] SEQ ID NO:544 is the determined cDNA sequence for clone 62116966 R0376:C08

[0592] SEQ ID NO:545 is the determined cDNA sequence for clone 62116967 R0376:C09

[0593] SEQ ID NO:546 is the determined cDNA sequence for clone 62116968 R0376:C10

[0594] SEQ ID NO:547 is the determined cDNA sequence for clone 62116969 R0376:C11

[0595] SEQ ID NO:548 is the determined cDNA sequence for clone 62116970 R0376:C12

[0596] SEQ ID NO:549 is the determined cDNA sequence for clone 62116971 R0376:D01

[0597] SEQ ID NO:550 is the determined cDNA sequence for clone 62116972 R0376:D02

[0598] SEQ ID NO:551 is the determined cDNA sequence for clone 62116973 R0376:D03

[0599] SEQ ID NO:552 is the determined cDNA sequence for clone 62116974 R0376:D04

[0600] SEQ ID NO:553 is the determined cDNA sequence for clone 62116975 R0376:D05

[0601] SEQ ID NO:554 is the determined cDNA sequence for clone 62116976 R0376:D06

[0602] SEQ ID NO:555 is the determined cDNA sequence for clone 62116977 R0376:D07

[0603] SEQ ID NO:556 is the determined cDNA sequence for clone 62116978 R0376:D08

[0604] SEQ ID NO:557 is the determined cDNA sequence for clone 62116979 R0376:D09

[0605] SEQ ID NO:558 is the determined cDNA sequence for clone 62116980 R0376:D10

[0606] SEQ ID NO:559 is the determined cDNA sequence for clone 62116981 R0376:D11

[0607] SEQ ID NO:560 is the determined cDNA sequence for clone 62116982 R0376:D12

[0608] SEQ ID NO:561 is the determined cDNA sequence for clone 62116983 R0376:E01

[0609] SEQ ID NO:562 is the determined cDNA sequence for clone 62116984 R0376:E02

[0610] SEQ ID NO:563 is the determined cDNA sequence for clone 62116985 R0376:E03

[0611] SEQ ID NO:564 is the determined cDNA sequence for clone 62116986 R0376:E04

[0612] SEQ ID NO:565 is the determined cDNA sequence for clone 62116987 R0376:E05

[0613] SEQ ID NO:566 is the determined cDNA sequence for clone 62116988 R0376:E06

[0614] SEQ ID NO:567 is the determined cDNA sequence for clone 62116989 R0376:E07

[0615] SEQ ID NO:568 is the determined cDNA sequence for clone 62116990 R0376:E08

[0616] SEQ ID NO:569 is the determined cDNA sequence for clone 62116991 R0376:E09

[0617] SEQ ID NO:570 is the determined cDNA sequence for clone 62116992 R0376:E10

[0618] SEQ ID NO:571 is the determined cDNA sequence for clone 62116993 R0376:E11

[0619] SEQ ID NO:572 is the determined cDNA sequence for clone 62116994 R0376:E12

[0620] SEQ ID NO:573 is the determined cDNA sequence for clone 62116995 R0376:F01

[0621] SEQ ID NO:574 is the determined cDNA sequence for clone 62116996 R0376:F02

[0622] SEQ ID NO:575 is the determined cDNA sequence for clone 62116997 R0376:F03

[0623] SEQ ID NO:576 is the determined cDNA sequence for clone 62116999 R0376:F05

[0624] SEQ ID NO:577 is the determined cDNA sequence for clone 62117000 R0376:F06

[0625] SEQ ID NO:578 is the determined cDNA sequence for clone 62117001 R0376:F07

[0626] SEQ ID NO:579 is the determined cDNA sequence for clone 62117002 R0376:F08

[0627] SEQ ID NO:580 is the determined cDNA sequence for clone 62117003 R0376:F09

[0628] SEQ ID NO:581 is the determined cDNA sequence for clone 62117004 R0376:F10

[0629] SEQ ID NO:582 is the determined cDNA sequence for clone 62117005 R0376:F11

[0630] SEQ ID NO:583 is the determined cDNA sequence for clone 62117006 R0376:F12

[0631] SEQ ID NO:584 is the determined cDNA sequence for clone 62117007 R0376:G01

[0632] SEQ ID NO:585 is the determined cDNA sequence for clone 62117008 R0376:G02

[0633] SEQ ID NO:586 is the determined cDNA sequence for clone 62117009 R0376:G03

[0634] SEQ ID NO:587 is the determined cDNA sequence for clone 62117010 R0376:G04

[0635] SEQ ID NO:588 is the determined cDNA sequence for clone 62117011 R0376:G05

[0636] SEQ ID NO:589 is the determined cDNA sequence for clone 62117012 R0376:G06

[0637] SEQ ID NO:590 is the determined cDNA sequence for clone 62117013 R0376:G07

[0638] SEQ ID NO:591 is the determined cDNA sequence for clone 62117014 R0376:G08

[0639] SEQ ID NO:592 is the determined cDNA sequence for clone 62117015 R0376:G09

[0640] SEQ ID NO:593 is the determined cDNA sequence for clone 62117016 R0376: G10

[0641] SEQ ID NO:594 is the determined cDNA sequence for clone 62117017 R0376:G11

[0642] SEQ ID NO:595 is the determined cDNA sequence for clone 62117018 R0376:G12

[0643] SEQ ID NO:596 is the determined cDNA sequence for clone 62117019 R0376:H01

[0644] SEQ ID NO:597 is the determined cDNA sequence for clone 62117020 R0376:H02

[0645] SEQ ID NO:598 is the determined cDNA sequence for clone 62117023 R0376:H05

[0646] SEQ ID NO:599 is the determined cDNA sequence for clone 62117024 R0376:H06

[0647] SEQ ID NO:600 is the determined cDNA sequence for clone 62117025 R0376:H07

[0648] SEQ ID NO:601 is the determined cDNA sequence for clone 62117026 R0376:H08

[0649] SEQ ID NO:602 is the determined cDNA sequence for clone 62117027 R0376:H09

[0650] SEQ ID NO:603 is the determined cDNA sequence for clone 62117028 R0376:H10

[0651] SEQ ID NO:604 is the determined cDNA sequence for clone 62117029 R0376:H11

[0652] SEQ ID NO:605 is the determined cDNA sequence for clone 62117123 R0377:A02

[0653] SEQ ID NO:606 is the determined cDNA sequence for clone 62117124 R0377:A03

[0654] SEQ ID NO:607 is the determined cDNA sequence for clone 62117125 R0377:A05

[0655] SEQ ID NO:608 is the determined cDNA sequence for clone 62117126 R0377:A06

[0656] SEQ ID NO:609 is the determined cDNA sequence for clone 62117127 R0377:A07

[0657] SEQ ID NO:610 is the determined cDNA sequence for clone 62117128 R0377:A08

[0658] SEQ ID NO:611 is the determined cDNA sequence for clone 62117129 R0377:A09

[0659] SEQ ID NO:612 is the determined cDNA sequence for clone 62117130 R0377:A10

[0660] SEQ ID NO:613 is the determined cDNA sequence for clone 62117131 R0377:A11

[0661] SEQ ID NO:614 is the determined cDNA sequence for clone 62117133 R0377:B01

[0662] SEQ ID NO:615 is the determined cDNA sequence for clone 62117135 R0377:B03

[0663] SEQ ID NO:616 is the determined cDNA sequence for clone 62117136 R0377:B04

[0664] SEQ ID NO:617 is the determined cDNA sequence for clone 62117137 R0377:B05

[0665] SEQ ID NO:618 is the determined cDNA sequence for clone 62117139 R0377:B:07

[0666] SEQ ID NO:619 is the determined cDNA sequence for clone 62117140 R0377:B08

[0667] SEQ ID NO:620 is the determined cDNA sequence for clone 62117141 R0377:B09

[0668] SEQ ID NO:621 is the determined cDNA sequence for clone 62117142 R0377:B10

[0669] SEQ ID NO:622 is the determined cDNA sequence for clone 62117143 R0377: B11

[0670] SEQ ID NO:623 is the determined cDNA sequence for clone 62117144 R0377:B12

[0671] SEQ ID NO:624 is the determined cDNA sequence for clone 62117146 R0377:C02

[0672] SEQ ID NO:625 is the determined cDNA sequence for clone 62117148 R0377:C04

[0673] SEQ ID NO:626 is the determined cDNA sequence for clone 62117150 R0377:C06

[0674] SEQ ID NO:627 is the determined cDNA sequence for clone 62117151 R0377:C07

[0675] SEQ ID NO:628 is the determined cDNA sequence for clone 62117153 R0377:C09

[0676] SEQ ID NO:629 is the determined cDNA sequence for clone 62117154 R0377:C10

[0677] SEQ ID NO:630 is the determined cDNA sequence for clone 62117155 R0377:C11

[0678] SEQ ID NO:631 is the determined cDNA sequence for clone 62117156 R0377:C12

[0679] SEQ ID NO:632 is the determined cDNA sequence for clone 62117158 R0377:D02

[0680] SEQ ID NO:633 is the determined cDNA sequence for clone 62117159 R0377:D03

[0681] SEQ ID NO:634 is the determined cDNA sequence for clone 62117160 R0377:D04

[0682] SEQ ID NO:635 is the determined cDNA sequence for clone 62117162 R0377:D06

[0683] SEQ ID NO:636 is the determined cDNA sequence for clone 62117163 R0377:D07

[0684] SEQ ID NO:637 is the determined cDNA sequence for clone 62117164 R0377:D08

[0685] SEQ ID NO:638 is the determined cDNA sequence for clone 62117165 R0377:D09

[0686] SEQ ID NO:639 is the determined cDNA sequence for clone 62117166 R0377:D10

[0687] SEQ ID NO:640 is the determined cDNA sequence for clone 62117167 R0377:D11

[0688] SEQ ID NO:641 is the determined cDNA sequence for clone 62117168 R0377:D12

[0689] SEQ ID NO:642 is the determined cDNA sequence for clone 62117169 R0377:E01

[0690] SEQ ID NO:643 is the determined cDNA sequence for clone 62117170 R0377:E02

[0691] SEQ ID NO:644 is the determined cDNA sequence for clone 62117171 R0377:E03

[0692] SEQ ID NO:645 is the determined cDNA sequence for clone 62117172 R0377:E04

[0693] SEQ ID NO:646 is the determined cDNA sequence for clone 62117173 R0377:E05

[0694] SEQ ID NO:647 is the determined cDNA sequence for clone 62117174 R0377:E06

[0695] SEQ ID NO:648 is the determined cDNA sequence for clone 62117176 R0377:E08

[0696] SEQ ID NO:649 is the determined .DNA sequence for clone 62117177 R0377:E09

[0697] SEQ ID NO:650 is the determined cDNA sequence for clone 62117178 R0377:E10

[0698] SEQ ID NO:651 is the determined cDNA sequence for clone 62117179 R0377:E11

[0699] SEQ ID NO:652 is the determined cDNA sequence for clone 62117180 R0377:E12

[0700] SEQ ID NO:653 is the determined .DNA sequence for clone 62117181 R0377:F01

[0701] SEQ ID NO:654 is the determined cDNA sequence for clone 62117182 R0377:F02

[0702] SEQ ID NO:655 is the determined cDNA sequence for clone 62117184 R0377:F04

[0703] SEQ ID NO:656 is the determined cDNA sequence for clone 62117185 R0377:F05

[0704] SEQ ID NO:657 is the determined cDNA sequence for clone 62117186 R0377:F06

[0705] SEQ ID NO:658 is the determined cDNA sequence for clone 62117187 R0377:F07

[0706] SEQ ID NO:659 is the determined cDNA sequence for clone 62117188 R0377:F08

[0707] SEQ ID NO:660 is the determined cDNA sequence for clone 62117189 R0377:F09

[0708] SEQ ID NO:661 is the determined cDNA sequence for clone 62117190 R0377:F10

[0709] SEQ ID NO:662 is the determined cDNA sequence for clone 62117191 R0377:F11

[0710] SEQ ID NO:663 is the determined cDNA sequence for clone 62117192 R0377:F12

[0711] SEQ ID NO:664 is the determined cDNA sequence for clone 62117193 R0377:G01

[0712] SEQ ID NO:665 is the determined cDNA sequence for clone 62117194 R0377:G02

[0713] SEQ ID NO:666 is the determined cDNA sequence for clone 62117195 R0377:G03

[0714] SEQ ID NO:667 is the determined cDNA sequence for clone 62117196 R0377:G04

[0715] SEQ ID NO:668 is the determined cDNA sequence for clone 62117197 R0377:G05

[0716] SEQ ID NO:669 is the determined cDNA sequence for clone 62117199 R0377:G07

[0717] SEQ ID NO:670 is the determined cDNA sequence for clone 62117200 R0377:G08

[0718] SEQ ID NO:671 is the determined cDNA sequence for clone 62117202 R0377:G10

[0719] SEQ ID NO:672 is the determined cDNA sequence for clone 62117203 R0377:G11

[0720] SEQ ID NO:673 is the determined cDNA sequence for clone 62117204 R0377:G02

[0721] SEQ ID NO:674 is the determined cDNA sequence for clone 62117205 R0377:H01

[0722] SEQ ID NO:675 is the determined cDNA sequence for clone 62117206 R0377:H02

[0723] SEQ ID NO:676 is the determined cDNA sequence for clone 62117207 R0377:H03

[0724] SEQ ID NO:677 is the determined cDNA sequence for clone 62117208 R0377:H04

[0725] SEQ ID NO:678 is the determined cDNA sequence for clone 62117209 R0377:H05

[0726] SEQ ID NO:679 is the determined cDNA sequence for clone 62117210 R0377:H06

[0727] SEQ ID NO:680 is the determined cDNA sequence for clone 62117211 R0377:H07

[0728] SEQ ID NO:681 is the determined cDNA sequence for clone 62117212 R0377:H08

[0729] SEQ ID NO:682 is the determined cDNA sequence for clone 62117213 R0377:H09

[0730] SEQ ID NO:683 is the determined cDNA sequence for clone 62117214 R0377:H10

[0731] SEQ ID NO:684 is the determined cDNA sequence for clone 62117216 R0378:A02

[0732] SEQ ID NO:685 is the determined cDNA sequence for clone 62117217 R0378:A03

[0733] SEQ ID NO:686 is the determined cDNA sequence for clone 62117218 R0378:A05

[0734] SEQ ID NO:687 is the determined cDNA sequence for clone 62117219 R0378:A06

[0735] SEQ ID NO:688 is the determined cDNA sequence for clone 62117220 R0378:A07

[0736] SEQ ID NO:689 is the determined cDNA sequence for clone 62117222 R0378:A09

[0737] SEQ ID NO:690 is the determined cDNA sequence for clone 62117223 R0378:A10

[0738] SEQ ID NO:691 is the determined cDNA sequence for clone 62117224 R0378:A11

[0739] SEQ ID NO:692 is the determined cDNA sequence for clone 62117225 R0378:A12

[0740] SEQ ID NO:693 is the determined cDNA sequence for clone 62117226 R0378:B01

[0741] SEQ ID NO:694 is the determined cDNA sequence for clone 62117227 R0378:B02

[0742] SEQ ID NO:695 is the determined cDNA sequence for clone 62117228 R0378:B03

[0743] SEQ ID NO:696 is the determined cDNA sequence for clone 62117229 R0378:B04

[0744] SEQ ID NO:697 is the determined cDNA sequence for clone 62117230 R0378:B05

[0745] SEQ ID NO:698 is the determined cDNA sequence for clone 62117232 R0378:B07

[0746] SEQ ID NO:699 is the determined cDNA sequence for clone 62117233 R0378:B08

[0747] SEQ ID NO:700 is the determined cDNA sequence for clone 62117234 R0378:B09

[0748] SEQ ID NO:701 is the determined cDNA sequence for clone 62117235 R0378:B10

[0749] SEQ ID NO:702 is the determined cDNA sequence for clone 62117237 R0378:B12

[0750] SEQ ID NO:703 is the determined cDNA sequence for clone 62117238 R0378:C01

[0751] SEQ ID NO:704 is the determined cDNA sequence for clone 62117239 R0378:C02

[0752] SEQ ID NO:705 is the determined cDNA sequence for clone 62117240 R0378:C03

[0753] SEQ ID NO:706 is the determined cDNA sequence for clone 62117241 R0378:C04

[0754] SEQ ID NO:707 is the determined cDNA sequence for clone 62117242 R0378:C05

[0755] SEQ ID NO:708 is the determined cDNA sequence for clone 62117243 R0378:C06

[0756] SEQ ID NO:709 is the determined cDNA sequence for clone 62117244 R0378:C07

[0757] SEQ ID NO:710 is the determined cDNA sequence for clone 62117245 R0378:C08

[0758] SEQ ID NO:711 is the determined cDNA sequence for clone 62117247 R0378:C10

[0759] SEQ ID NO:712 is the determined cDNA sequence for clone 62117248 R0378:C11

[0760] SEQ ID NO:713 is the determined cDNA sequence for clone 62117250 R0378:D01

[0761] SEQ ID NO:714 is the determined cDNA sequence for clone 62117251 R0378:D02

[0762] SEQ ID NO:715 is the determined cDNA sequence for clone 62117252 R0378:D03

[0763] SEQ ID NO:716 is the determined cDNA sequence for clone 62117253 R0378:D04

[0764] SEQ ID NO:717 is the determined cDNA sequence for clone 62117254 R0378:D05

[0765] SEQ ID NO:718 is the determined cDNA sequence for clone 62117255 R0378:D06

[0766] SEQ ID NO:719 is the determined cDNA sequence for clone 62117256 R0378:D07

[0767] SEQ ID NO:720 is the determined cDNA sequence for clone 62117257 R0378:D08

[0768] SEQ ID NO:721 is the determined cDNA sequence for clone 62117258 R0378:D09

[0769] SEQ ID NO:722 is the determined cDNA sequence for clone 62117259 R0378:D10

[0770] SEQ ID NO:723 is the determined cDNA sequence for clone 62117261 R0378:D12

[0771] SEQ ID NO:724 is the determined cDNA sequence for clone 62117262 R0378:E01

[0772] SEQ ID NO:725 is the determined cDNA sequence for clone 62117263 R0378:E02

[0773] SEQ ID NO:726 is the determined cDNA sequence for clone 62117264 R0378:E03

[0774] SEQ ID NO:727 is the determined cDNA sequence for clone 62117265 R0378:E04

[0775] SEQ ID NO:728 is the determined cDNA sequence for clone 62117266 R0378:E05

[0776] SEQ ID NO:729 is the determined cDNA sequence for clone 62117267 R0378:E06

[0777] SEQ ID NO:730 is the determined cDNA sequence for clone 62117268 R0378:E07

[0778] SEQ ID NO:731 is the determined cDNA sequence for clone 62117269 R0378:E08

[0779] SEQ ID NO:732 is the determined cDNA sequence for clone 62117270 R0378:E09

[0780] SEQ ID NO:733 is the determined cDNA sequence for clone 62117271 R0378:E10

[0781] SEQ ID NO:734 is the determined cDNA sequence for clone 62117272 R0378:E11

[0782] SEQ ID NO:735 is the determined cDNA sequence for clone 62117273 R0378:E12

[0783] SEQ ID NO:736 is the determined cDNA sequence for clone 62117274 R0378:F01

[0784] SEQ ID NO:737 is the determined cDNA sequence for clone 62117275 R0378:F02

[0785] SEQ ID NO:738 is the determined cDNA sequence for clone 62117276 R0378:F03

[0786] SEQ ID NO:739 is the determined cDNA sequence for clone 62117277 R0378:F04

[0787] SEQ ID NO:740 is the determined cDNA sequence for clone 62117278 R0378:F05

[0788] SEQ ID NO:741 is the determined cDNA sequence for clone 62117279 R0378:F06

[0789] SEQ ID NO:742 is the determined cDNA sequence for clone 62117280 R0378:F07

[0790] SEQ ID NO:743 is the determined cDNA sequence for clone 62117281 R0378:F08

[0791] SEQ ID NO:744 is the determined cDNA sequence for clone 62117282 R0378:F09

[0792] SEQ ID NO:745 is the determined cDNA sequence for clone 62117283 R0378:F10

[0793] SEQ ID NO:746 is the determined cDNA sequence for clone 62117285 R0378:F12

[0794] SEQ ID NO:747 is the determined cDNA sequence for clone 62117287 R0378:G02

[0795] SEQ ID NO:748 is the determined cDNA sequence for clone 62117288 R0378:G03

[0796] SEQ ID NO:749 is the determined cDNA sequence for clone 62117289 R0378:G04

[0797] SEQ ID NO:750 is the determined cDNA sequence for clone 62117290 R0378:G05

[0798] SEQ ID NO:751 is the determined cDNA sequence for clone 62117291 R0378:G06

[0799] SEQ ID NO:752 is the determined cDNA sequence for clone 62117292 R0378:G07

[0800] SEQ ID NO:753 is the determined cDNA sequence for clone 62117293 R0378:G08

[0801] SEQ ID NO:754 is the determined cDNA sequence for clone 62117294 R0378:G09

[0802] SEQ ID NO:755 is the determined cDNA sequence for clone 62117295 R0378:G10

[0803] SEQ ID NO:756 is the determined cDNA sequence for clone 62117296 R0378:G11

[0804] SEQ ID NO:757 is the determined cDNA sequence for clone 62117297 R0378:G12

[0805] SEQ ID NO:758 is the determined cDNA sequence for clone 62117298 R0378:H01

[0806] SEQ ID NO:759 is the determined cDNA sequence for clone 62117299 R0378:H02

[0807] SEQ ID NO:760 is the determined cDNA sequence for clone 62117300 R0378:H03

[0808] SEQ ID NO:761 is the determined cDNA sequence for clone 62117301 R0378:H04

[0809] SEQ ID NO:762 is the determined cDNA sequence for clone 62117302 R0378:H05

[0810] SEQ ID NO:763 is the determined cDNA sequence for clone 62117303 R0378:H:06

[0811] SEQ ID NO:764 is the determined cDNA sequence for clone 62117304 R0378:H07

[0812] SEQ ID NO:765 is the determined cDNA sequence for clone 62117305 R0378:H08

[0813] SEQ ID NO:766 is the determined cDNA sequence for clone 62117306 R0378:H09

[0814] SEQ ID NO:767 is the determined cDNA sequence for clone 62117307 R0378:H10

[0815] SEQ ID NO:768 is the determined cDNA sequence for clone 62117308 R0378:H11

[0816] SEQ ID NO:769 is the determined cDNA sequence for clone 62111835 R0379:A02

[0817] SEQ ID NO:770 is the determined cDNA sequence for clone 62111836 R0379:A03

[0818] SEQ ID NO:771 is the determined cDNA sequence for clone 62111837 R0379:A05

[0819] SEQ ID NO:772 is the determined cDNA sequence for clone 62111838 R0379:A06

[0820] SEQ ID NO:773 is the determined cDNA sequence for clone 62111839 R0379:A07

[0821] SEQ ID NO:774 is the determined cDNA sequence for clone 62111840 R0379:A08

[0822] SEQ ID NO:775 is the determined cDNA sequence for clone 62111841 R0379:A09

[0823] SEQ ID NO:776 is the determined cDNA sequence for clone 62111842 R0379:A10

[0824] SEQ ID NO:777 is the determined cDNA sequence for clone 62111843 R0379:A11

[0825] SEQ ID NO:778 is the determined cDNA sequence for clone 62111844 R0379:A12

[0826] SEQ ID NO:779 is the determined cDNA sequence for clone 62111846 R0379:B02

[0827] SEQ ID NO:780 is the determined cDNA sequence for clone 62111847 R0379:B03

[0828] SEQ ID NO:781 is the determined cDNA sequence for clone 62111848 R0379:B04

[0829] SEQ ID NO:782 is the determined cDNA sequence for clone 62111849 R0379:B05

[0830] SEQ ID NO:783 is the determined cDNA sequence for clone 62111850 R0379:B06

[0831] SEQ ID NO:784 is the determined DNA sequence for clone 62111851 R0379:B07

[0832] SEQ ID NO:785 is the determined cDNA sequence for clone 62111852 R0379:B08

[0833] SEQ ID NO:786 is the determined cDNA sequence for clone 62111854 R0379:B10

[0834] SEQ ID NO:787 is the determined cDNA sequence for clone 62111855 R0379:B11

[0835] SEQ ID NO:788 is the determined cDNA sequence for clone 62111857 R0379:C01

[0836] SEQ ID NO:789 is the determined cDNA sequence for clone 62111858 R0379:C02

[0837] SEQ ID NO:790 is the determined cDNA sequence for clone 62111859 R0379:C03

[0838] SEQ ID NO:791 is the determined cDNA sequence for clone 62111860 R0379:C04

[0839] SEQ ID NO:792 is the determined cDNA sequence for clone 62111861 R0379:C05

[0840] SEQ ID NO:793 is the determined cDNA sequence for clone 62111864 R0379:C08

[0841] SEQ ID NO:794 is the determined cDNA sequence for clone 62111865 R0379:C09

[0842] SEQ ID NO:795 is the determined cDNA sequence for clone 62111866 R0379:C10

[0843] SEQ ID NO:796 is the determined cDNA sequence for clone 62111867 R0379:C11

[0844] SEQ ID NO:797 is the determined cDNA sequence for clone 62111869 R0379:D01

[0845] SEQ ID NO:798 is the determined cDNA sequence for clone 62111870 R0379:D02

[0846] SEQ ID NO:799 is the determined cDNA sequence for clone 62111872 R0379:D04

[0847] SEQ ID NO:800 is the determined cDNA sequence for clone 62111873 R0379:D05

[0848] SEQ ID NO:801 is the determined cDNA sequence for clone 62111874 R0379:D06

[0849] SEQ ID NO:802 is the determined cDNA sequence for clone 62111875 R0379:D07

[0850] SEQ ID NO:803 is the determined cDNA sequence for clone 62111876 R0379:D08

[0851] SEQ ID NO:804 is the determined cDNA sequence for clone 62111877 R0379:D09

[0852] SEQ ID NO:805 is the determined cDNA sequence for clone 62111878 R0379:D10

[0853] SEQ ID NO:806 is the determined cDNA sequence for clone 62111879 R0379:D11

[0854] SEQ ID NO:807 is the determined cDNA sequence for clone 62111881 R0379:E01

[0855] SEQ ID NO:808 is the determined cDNA sequence for clone 62111882 R0379:E02

[0856] SEQ ID NO:809 is the determined cDNA sequence for clone 62111883 R0379:E03

[0857] SEQ ID NO:810 is the determined cDNA sequence for clone 62111884 R0379:E04

[0858] SEQ ID NO:811 is the determined cDNA sequence for clone 62111885 R0379:E05

[0859] SEQ ID NO:812 is the determined cDNA sequence for clone 62111886 R0379:E06

[0860] SEQ ID NO:813 is the determined cDNA sequence for clone 62111887 R0379:E07

[0861] SEQ ID NO:814 is the determined cDNA sequence for clone 62111888 R0379:E08

[0862] SEQ ID NO:815 is the determined cDNA sequence for clone 62111889 R0379:E09

[0863] SEQ ID NO:816 is the determined cDNA sequence for clone 62111890 R0379:E10

[0864] SEQ ID NO:817 is the determined cDNA sequence for clone 62111891 R0379:E11

[0865] SEQ ID NO:818 is the determined cDNA sequence for clone 62111892 R0379:E12

[0866] SEQ ID NO:819 is the determined cDNA sequence for clone 62111893 R0379:F01

[0867] SEQ ID NO:820 is the determined cDNA sequence for clone 62111894 R0379:F02

[0868] SEQ ID NO:821 is the determined cDNA sequence for clone 62111895 R0379:F03

[0869] SEQ ID NO:822 is the determined cDNA sequence for clone 62111896 R0379:F04

[0870] SEQ ID NO:823 is the determined cDNA sequence for clone 62111897 R0379:F05

[0871] SEQ ID NO:824 is the determined cDNA sequence for clone 62111898 R0379:F06

[0872] SEQ ID NO:825 is the determined cDNA sequence for clone 62111899 R0379:F07

[0873] SEQ ID NO:826 is the determined cDNA sequence for clone 62111900 R0379:F08

[0874] SEQ ID NO:827 is the determined cDNA sequence for clone 62111901 R0379:F09

[0875] SEQ ID NO:828 is the determined cDNA sequence for clone 62111902 R0379:F10

[0876] SEQ ID NO:829 is the determined cDNA sequence for clone 62111903 R0379:F11

[0877] SEQ ID NO:830 is the determined cDNA sequence for clone 62111904 R0379:F12

[0878] SEQ ID NO:831 is the determined cDNA sequence for clone 62111905 R0379:G01

[0879] SEQ ID NO:832 is the determined cDNA sequence for clone 62111906 R0379:G02

[0880] SEQ ID NO:833 is the determined cDNA sequence for clone 62111907 R0379:G03

[0881] SEQ ID NO:834 is the determined cDNA sequence for clone 62111908 R0379:G04

[0882] SEQ ID NO:835 is the determined cDNA sequence for clone 62111909 R0379:G05

[0883] SEQ ID NO:836 is the determined cDNA sequence for clone 62111910 R0379:G06

[0884] SEQ ID NO:837 is the determined cDNA sequence for clone 62111911 R0379:G07

[0885] SEQ ID NO:838 is the determined cDNA sequence for clone 62111912 R0379:G08

[0886] SEQ ID NO:839 is the determined cDNA sequence for clone 62111913 R0379:G09

[0887] SEQ ID NO:840 is the determined cDNA sequence for clone 62111914 R0379:G10

[0888] SEQ ID NO:841 is the determined cDNA sequence for clone 62111916 R0379:G12

[0889] SEQ ID NO:842 is the determined cDNA sequence for clone 62111917 R0379:H01

[0890] SEQ ID NO:843 is the determined cDNA sequence for clone 62111918 R0379:H02

[0891] SEQ ID NO:844 is the determined cDNA sequence for clone 62111919 R0379:H03

[0892] SEQ ID NO:845 is the determined cDNA sequence for clone 62111920 R0379:H04

[0893] SEQ ID NO:846 is the determined cDNA sequence for clone 62111921 R0379:H05

[0894] SEQ ID NO:847 is the determined cDNA sequence for clone 62111922 R0379:H:06

[0895] SEQ ID NO:848 is the determined cDNA sequence for clone 62111923 R0379:H07

[0896] SEQ ID NO:849 is the determined cDNA sequence for clone 62111924 R0379:H08

[0897] SEQ ID NO:850 is the determined cDNA sequence for clone 62111925 R0379:H09

[0898] SEQ ID NO:851 is the determined cDNA sequence for clone 62111926 R0379:H10

[0899] SEQ ID NO:852 is the determined cDNA sequence for clone 62111927 R0379:H11

[0900] SEQ ID NO:853 is the determined cDNA sequence for clone 62112630 R0380:A02

[0901] SEQ ID NO:854 is the determined cDNA sequence for clone 62112631 R0380:A03

[0902] SEQ ID NO:855 is the determined cDNA sequence for clone 62112632 R0380:A05

[0903] SEQ ID NO:856 is the determined cDNA sequence for clone 62112633 R0380:A06

[0904] SEQ ID NO:857 is the determined cDNA sequence for clone 62112634 R0380:A07

[0905] SEQ ID NO:858 is the determined cDNA sequence for clone 62112635 R0380:A08

[0906] SEQ ID NO:859 is the determined cDNA sequence for clone 62112636 R0380:A09

[0907] SEQ ID NO:860 is the determined cDNA sequence for clone 62112637 R0380:A10

[0908] SEQ ID NO:861 is the determined cDNA sequence for clone 62112639 R0380:A12

[0909] SEQ ID NO:862 is the determined cDNA sequence for clone 62112640 R0380:B01

[0910] SEQ ID NO:863 is the determined cDNA sequence for clone 62112641 R0380:B02

[0911] SEQ ID NO:864 is the determined cDNA sequence for clone 62112642 R0380:B03

[0912] SEQ ID NO:865 is the determined cDNA sequence for clone 62112643 R0380:B04

[0913] SEQ ID NO:866 is the determined cDNA sequence for clone 62112644 R0380:B05

[0914] SEQ ID NO:867 is the determined cDNA sequence for clone 62112645 R0380:B06

[0915] SEQ ID NO:868 is the determined cDNA sequence for clone 62112646 R0380:B07

[0916] SEQ ID NO:869 is the determined cDNA sequence for clone 62112647 R0380:B08

[0917] SEQ ID NO:870 is the determined cDNA sequence for clone 62112648 R0380:B09

[0918] SEQ ID NO:871 is the determined cDNA sequence for clone 62112649 R0380:B10

[0919] SEQ ID NO:872 is the determined cDNA sequence for clone 62112650 R0380:B11

[0920] SEQ ID NO:873 is the determined cDNA sequence for clone 62112652 R0380:C01

[0921] SEQ ID NO:874 is the determined cDNA sequence for clone 62112653 R0380:C02

[0922] SEQ ID NO:875 is the determined cDNA sequence for clone 62112654 R0380:C03

[0923] SEQ ID NO:876 is the determined cDNA sequence for clone 62112655 R0380:C04

[0924] SEQ ID NO:877 is the determined cDNA sequence for clone 62112656 R0380:C05

[0925] SEQ ID NO:878 is the determined cDNA sequence for clone 62112658 R0380:C07

[0926] SEQ ID NO:879 is the determined cDNA sequence for clone 62112659 R0380:C08

[0927] SEQ ID NO:880 is the determined cDNA sequence for clone 62112660 R0380:C09

[0928] SEQ ID NO:881 is the determined cDNA sequence for clone 62112661 R0380:C10

[0929] SEQ ID NO:882 is the determined cDNA sequence for clone 62112662 R0380:C11

[0930] SEQ ID NO:883 is the determined cDNA sequence for clone 62112663 R0380:C12

[0931] SEQ ID NO:884 is the determined cDNA sequence for clone 62112664 R0380:D01

[0932] SEQ ID NO:885 is the determined cDNA sequence for clone 62112665 R0380:D02

[0933] SEQ ID NO:886 is the determined cDNA sequence for clone 62112666 R0380:D03

[0934] SEQ ID NO:887 is the determined cDNA sequence for clone 62112667 R0380:D04

[0935] SEQ ID NO:888 is the determined cDNA sequence for clone 62112668 R0380:D05

[0936] SEQ ID NO:889 is the determined cDNA sequence for clone 62112669 R0380:D06

[0937] SEQ ID NO:890 is the determined cDNA sequence for clone 62112670 R0380:D07

[0938] SEQ ID NO:891 is the determined cDNA sequence for clone 62112671 R0380:D08

[0939] SEQ ID NO:892 is the determined cDNA sequence for clone 62112673 R0380:D10

[0940] SEQ ID NO:893 is the determined cDNA sequence for clone 62112674 R0380:D11

[0941] SEQ ID NO:894 is the determined cDNA sequence for clone 62112675 R0380:D12

[0942] SEQ ID NO:895 is the determined cDNA sequence for clone 62112676 R0380:E01

[0943] SEQ ID NO:896 is the determined cDNA sequence for clone 62112677 R0380:E02

[0944] SEQ ID NO:897 is the determined cDNA sequence for clone 62112678 R0380:E03

[0945] SEQ ID NO:898 is the determined cDNA sequence for clone 62112679 R0380:E04

[0946] SEQ ID NO:899 is the determined cDNA sequence for clone 62112681 R0380:E06

[0947] SEQ ID NO:900 is the determined cDNA sequence for clone 62112683 R0380:E08

[0948] SEQ ID NO:901 is the determined cDNA sequence for clone 62112684 R0380:E09

[0949] SEQ ID NO:902 is the determined cDNA sequence for clone 62112685 R0380:E10

[0950] SEQ ID NO:903 is the determined cDNA sequence for clone 62112686 R0380:E11

[0951] SEQ ID NO:904 is the determined cDNA sequence for clone 62112687 R0380:E12

[0952] SEQ ID NO:905 is the determined cDNA sequence for clone 62112688 R0380:F01

[0953] SEQ ID NO:906 is the determined cDNA sequence for clone 62112689 R0380:F02

[0954] SEQ ID NO:907 is the determined cDNA sequence for clone 62112690 R0380:F03

[0955] SEQ ID NO:908 is the determined cDNA sequence for clone 62112691 R0380:F04

[0956] SEQ ID NO:909 is the determined cDNA sequence for clone 62112692 R0380:F05

[0957] SEQ ID NO:910 is the determined cDNA sequence for clone 62112693 R0380:F06

[0958] SEQ ID NO:911 is the determined cDNA sequence for clone 62112694 R0380:F07

[0959] SEQ ID NO:912 is the determined cDNA sequence for clone 62112695 R0380:F08

[0960] SEQ ID NO:913 is the determined cDNA sequence for clone 62112696 R0380:F09

[0961] SEQ ID NO:914 is the determined cDNA sequence for clone 62112697 R0380:F10

[0962] SEQ ID NO:915 is the determined cDNA sequence for clone 62112698 R0380:F11

[0963] SEQ ID NO:916 is the determined cDNA sequence for clone 62112699 R0380:F12

[0964] SEQ ID NO:917 is the determined cDNA sequence for clone 62112700 R0380:G01

[0965] SEQ ID NO:918 is the determined cDNA sequence for clone 62112701 R0380:G02

[0966] SEQ ID NO:919 is the determined cDNA sequence for clone 62112702 R0380:G03

[0967] SEQ ID NO:920 is the determined cDNA sequence for clone 62112703 R0380:G04

[0968] SEQ ID NO:921 is the determined cDNA sequence for clone 62112704 R0380:G05

[0969] SEQ ID NO:922 is the determined cDNA sequence for clone 62112706 R0380:G07

[0970] SEQ ID NO:923 is the determined cDNA sequence for clone 62112707 R0380:G08

[0971] SEQ ID NO:924 is the determined cDNA sequence for clone 62112708 R0380:G09

[0972] SEQ ID NO:925 is the determined cDNA sequence for clone 62112709 R0380:G10

[0973] SEQ ID NO:926 is the determined cDNA sequence for clone 62112710 R0380:G11

[0974] SEQ ID NO:927 is the determined cDNA sequence for clone 62112711 R0380:G12

[0975] SEQ ID NO:928 is the determined cDNA sequence for clone 62112712 R0380:H01

[0976] SEQ ID NO:929 is the determined cDNA sequence for clone 62112713 R0380:H02

[0977] SEQ ID NO:930 is the determined cDNA sequence for clone 62112714 R0380:H03

[0978] SEQ ID NO:931 is the determined cDNA sequence for clone 62112715 R0380:H04

[0979] SEQ ID NO:932 is the determined cDNA sequence for clone 62112716 R0380:H05

[0980] SEQ ID NO:933 is the determined cDNA sequence for clone 62112717 R0380:H06

[0981] SEQ ID NO:934 is the determined cDNA sequence for clone 62112718 R0380:H07

[0982] SEQ ID NO:935 is the determined cDNA sequence for clone 62112719 R0380:H08

[0983] SEQ ID NO:936 is the determined cDNA sequence for clone 62112720 R0380:H09

[0984] SEQ ID NO:937 is the determined cDNA sequence for clone 62112721 R0380:H10

[0985] SEQ ID NO:938 is the determined cDNA sequence for clone 62112021 R0381:A02

[0986] SEQ ID NO:939 is the determined cDNA sequence for clone 62112022 R0381:A03

[0987] SEQ ID NO:940 is the determined cDNA sequence for clone 62112023 R0381:A05

[0988] SEQ ID NO:941 is the determined cDNA sequence for clone 62112024 R0380 :A06

[0989] SEQ ID NO:942 is the determined cDNA sequence for clone 62112025 R0381:A07

[0990] SEQ ID NO:943 is the determined cDNA sequence for clone 62112026 R0381:A08

[0991] SEQ ID NO:944 is the determined cDNA sequence for clone 62112027 R0381:A09

[0992] SEQ ID NO:945 is the determined cDNA sequence for clone 62112028 R0381:A10

[0993] SEQ ID NO:946 is the determined cDNA sequence for clone 62112029 R0381 A11

[0994] SEQ ID NO:947 is the determined cDNA sequence for clone 62112031 R0381:B01

[0995] SEQ ID NO:948 is the determined cDNA sequence for clone 62112032 R0381:B02

[0996] SEQ ID NO:949 is the determined cDNA sequence for clone 62112033 R0381:B03

[0997] SEQ ID NO:950 is the determined cDNA sequence for clone 62112034 R0381:B04

[0998] SEQ ID NO:951 is the determined cDNA sequence for clone 62112035 R0381:B05

[0999] SEQ ID NO:952 is the determined cDNA sequence for clone 62112036 R0381:B06

[1000] SEQ ID NO:953 is the determined cDNA sequence for clone 62112037 R0381:B07

[1001] SEQ ID NO:954 is the determined cDNA sequence for clone 62112038 R0381:B08

[1002] SEQ ID NO:955 is the determined cDNA sequence for clone 62112039 R0381:B09

[1003] SEQ ID NO:956 is the determined cDNA sequence for clone 62112040 R0381:B10

[1004] SEQ ID NO:957 is the determined cDNA sequence for clone 62112041 R0381:B11

[1005] SEQ ID NO:958 is the determined cDNA sequence for clone 62112042 R0381:B12

[1006] SEQ ID NO:959 is the determined cDNA sequence for clone 62112043 R03.8 C01

[1007] SEQ ID NO:960 is the determined cDNA sequence for clone 62112044 R0381:C02

[1008] SEQ .D NO:961 is the determined cDNA sequence for clone 62112046 R0381:C04

[1009] SEQ ID NO:962 is the determined cDNA sequence for clone 62112047 R0381:C05

[1010] SEQ ID NO:963 is the determined cDNA sequence for clone 62112049 R0381:C07

[1011] SEQ ID NO:964 is the determined cDNA sequence for clone 62112050 R0381:C08

[1012] SEQ ID NO:965 is the determined cDNA sequence for clone 62112051 R0381:C09

[1013] SEQ ID NO:966 is the determined cDNA sequence for clone 62112052 R0381:C10

[1014] SEQ ID NO:967 is the determined cDNA sequence for clone 62112053 R0381:C11

[1015] SEQ ID NO:968 is the determined cDNA sequence for clone 62112054 R0381:C12

[1016] SEQ ID NO:969 is the determined cDNA sequence for clone 62112057 R0381:D03

[1017] SEQ ID NO:970 is the determined cDNA sequence for clone 62112058 R0381:D04

[1018] SEQ ID NO:971 is the determined cDNA sequence for clone 62112059 R0381:D05

[1019] SEQ ID NO:972 is the determined cDNA sequence for clone 62112060 R0381:D06

[1020] SEQ ID NO:973 is the determined cDNA sequence for clone 62112061 R0381:D07

[1021] SEQ ID NO:974 is the determined cDNA sequence for clone 62112062 R0381:D08

[1022] SEQ ID NO:975 is the determined cDNA sequence for clone 62112063 R0381:D09

[1023] SEQ ID NO:976 is the determined cDNA sequence for clone 62112064 R0381:D10

[1024] SEQ ID NO:977 is the determined cDNA sequence for clone 62112065 R0381:D11

[1025] SEQ ID NO:978 is the determined cDNA sequence for clone 62112066 R0381:D12

[1026] SEQ ID NO:979 is the determined cDNA sequence for clone 62112067 R0381:E01

[1027] SEQ ID NO:980 is the determined cDNA sequence for clone 62112068 R0381:E02

[1028] SEQ ID NO:981 is the determined cDNA sequence for clone 62112069 R0381:E03

[1029] SEQ ID NO:982 is the determined cDNA sequence for clone 62112070 R0381:E04

[1030] SEQ ID NO:983 is the determined cDNA sequence for clone 62112071 R0381:E05

[1031] SEQ ID NO:984 is the determined cDNA sequence for clone 62112072 R0381:E06

[1032] SEQ ID NO:985 is the determined cDNA sequence for clone 62112073 R0381:E07

[1033] SEQ ID NO:986 is the determined cDNA sequence for clone 62112074 R0381:E08

[1034] SEQ ID NO:987 is the determined cDNA sequence for clone 62112075 R0381:E09

[1035] SEQ ID NO:988 is the determined cDNA sequence for clone 62112076 R0381:E10

[1036] SEQ ID NO:989 is the determined cDNA sequence for clone 62112077 R0381:E11

[1037] SEQ ID NO:990 is the determined cDNA sequence for clone 62112078 R0381:E12

[1038] SEQ ID NO:991 is the determined cDNA sequence for clone 62112079 R0381:F01

[1039] SEQ ID NO:992 is the determined cDNA sequence for clone 62112080 R0381.:F02

[1040] SEQ ID NO:993 is the determined cDNA sequence for clone 62112081 R0381:F03

[1041] SEQ ID NO:994 is the determined cDNA sequence for clone 62112082 R0381:F04

[1042] SEQ ID NO:995 is the determined cDNA sequence for clone 62112083 R0381:F05

[1043] SEQ ID NO:996 is the determined cDNA sequence for clone 62112084 R03.8 .:F06

[1044] SEQ ID NO:997 is the determined cDNA sequence for clone 62112085 R0381:F07

[1045] SEQ ID NO:998 is the determined cDNA sequence for clone 62112086 R0381:F8

[1046] SEQ ID NO:999 is the determined cDNA sequence for clone 62112087 R0381:F09

[1047] SEQ ID NO:1000 is the determined cDNA sequence for clone 62112088 R0381:F10

[1048] SEQ ID NO:1001 is the determined cDNA sequence for clone 62112089 R0381:F11

[1049] SEQ ID NO:1002 is the determined cDNA sequence for clone 62112090 R0381:F12

[1050] SEQ ID NO:1003 is the determined cDNA sequence for clone 62112092 R0381: G02

[1051] SEQ ID NO:1004 is the determined cDNA sequence for clone 62112093 R0381:G03

[1052] SEQ ID NO:1005 is the determined cDNA sequence for clone 62112095 R0381:G05

[1053] SEQ ID NO:1006 is the determined cDNA sequence for clone 62112096 R0381 : G06

[1054] SEQ ID NO:1007 is the determined cDNA sequence for clone 62112097 R0381:G07

[1055] SEQ ID NO:1008 is the determined cDNA sequence for clone 62112098 R0381:G08

[1056] SEQ ID NO:1009 is the determined cDNA sequence for clone 62112099 R0381:G09

[1057] SEQ ID NO:1010 is the determined cDNA sequence for clone 62112100 R0381:G10

[1058] SEQ ID NO:1011 is the determined cDNA sequence for clone 62112101 R0381:G11

[1059] SEQ ID NO:1012 is the determined cDNA sequence for clone 62112102 R0381:G12

[1060] SEQ ID NO:1013 is the determined cDNA sequence for clone 62112103 R0381:H01

[1061] SEQ ID NO:1014 is the determined cDNA sequence for clone 62112104 R0381:H02

[1062] SEQ ID NO:1015 is the determined cDNA sequence for clone 62112105 R0381:H03

[1063] SEQ ID NO:1016 is the determined cDNA sequence for clone 62112106 R0381:H04

[1064] SEQ ID NO:1017 is the determined cDNA sequence for clone 62112107 R0381:H05

[1065] SEQ ID NO:1018 is the determined cDNA sequence for clone 62112108 R0381:H06

[1066] SEQ ID NO:1019 is the determined cDNA sequence for clone 62112109 R0381:H07

[1067] SEQ ID NO:1020 is the determined cDNA sequence for clone 62112110 R0381:H08

[1068] SEQ ID NO:1021 is the determined cDNA sequence for clone 62112111 R0381:H09

[1069] SEQ ID NO:1022 is the determined cDNA sequence for clone 62112112 R0381:H10

[1070] SEQ ID NO:1023 is the determined cDNA sequence for clone 62112113 R03:8 :H11

[1071] SEQ ID NO:1024 is the determined cDNA sequence for clone 62117402 R0382:A02

[1072] SEQ ID NO:1025 is the determined cDNA sequence for clone 62117403 R0382:A03

[1073] SEQ ID NO:1026 is the determined cDNA sequence for clone 62117405 R0382:A06

[1074] SEQ ID NO:1027 is the determined cDNA sequence for clone 62117406 R0382:A07

[1075] SEQ ID NO:1028 is the determined cDNA sequence for clone 62117407 R0382:A08

[1076] SEQ ID NO:1029 is the determined cDNA sequence for clone 62117408 R0382:A09

[1077] SEQ ID NO:1030 is the determined cDNA sequence for clone 62117409 R0382:A10

[1078] SEQ ID NO:1031 is the determined cDNA sequence for clone 62117410 R0382:A11

[1079] SEQ ID NO:1032 is the determined cDNA sequence for clone 62117411 R0382:A12

[1080] SEQ ID NO:1033 is the determined cDNA sequence for clone 62117412 R0382:B01

[1081] SEQ ID NO:1034 is the determined cDNA sequence for clone 62117413 R0382:B02

[1082] SEQ ID NO:1035 is the determined cDNA sequence for clone 62117414 R0382:B03

[1083] SEQ ID NO:1036 is the determined cDNA sequence for clone 62117415 R0382:B04

[1084] SEQ ID NO:1037 is the determined cDNA sequence for clone 62117416 R0382:B05

[1085] SEQ ID NO:1038 is the determined cDNA sequence for clone 62117418 R0382:B07

[1086] SEQ ID NO:1039 is the determined cDNA sequence for clone 62117419 R0382:B08

[1087] SEQ ID NO:1040 is the determined cDNA sequence for clone 62117420 R0382:B09

[1088] SEQ ID NO:1041 is the determined cDNA sequence for clone 62117421 R0382:B10

[1089] SEQ ID NO:1042 is the determined cDNA sequence for clone 62117422 R0382:B11

[1090] SEQ ID NO:1043 is the determined cDNA sequence for clone 62117423 R0382:B12

[1091] SEQ ID NO:1044 is the determined cDNA sequence for clone 62117424 R0382:C01

[1092] SEQ ID NO:1045 is the determined cDNA sequence for clone 62117425 R0382:C02

[1093] SEQ ID NO:1046 is the determined cDNA sequence for clone 62117426 R0382:C03

[1094] SEQ ID NO:1047 is the determined cDNA sequence for clone 62117427 R0382:C04

[1095] SEQ ID NO:1048 is the determined cDNA sequence for clone 62117429 R0382:C06

[1096] SEQ ID NO:1049 is the determined cDNA sequence for clone 62117430 R0382:C07

[1097] SEQ ID NO:1050 is the determined cDNA sequence for clone 62117432 R0382:C09

[1098] SEQ ID NO:1051 is the determined cDNA sequence for clone 62117433 R0382:C10

[1099] SEQ ID NO:1052 is the determined cDNA sequence for clone 62117434 R0382:C11

[1100] SEQ ID NO:1053 is the determined cDNA sequence for clone 62117435 R0382:C12

[1101] SEQ ID NO:1054 is the determined cDNA sequence for clone 62117437 R0382:D02

[1102] SEQ ID NO:1055 is the determined cDNA sequence for clone 62117438 R0382:D03

[1103] SEQ ID NO:1056 is the determined cDNA sequence for clone 62117439 R0382:D04

[1104] SEQ ID NO:1057 is the determined cDNA sequence for clone 62117440 R0382:D05

[1105] SEQ ID NO:1058 is the determined cDNA sequence for clone 62117441 R0382:D06

[1106] SEQ ID NO:1059 is the determined cDNA sequence for clone 62117442 R0382:D07

[1107] SEQ ID NO:1060 is the determined cDNA sequence for clone 62117443 R0382:D08

[1108] SEQ ID NO:1061 is the determined cDNA sequence for clone 62117444 R0382:D09

[1109] SEQ ID NO:1062 is the determined cDNA sequence for clone 62117445 R0382:D10

[1110] SEQ ID NO:1063 is the determined cDNA sequence for clone 62117446 R0382:D11

[1111] SEQ ID NO:1064 is the determined cDNA sequence for clone 62117447 R0382:D12

[1112] SEQ ID NO:1065 is the determined cDNA sequence for clone 62117448 R0382:E01

[1113] SEQ ID NO:1066 is the determined cDNA sequence for clone 62117449 R0382:E02

[1114] SEQ ID NO:1067 is the determined cDNA sequence for clone 62117450 R0382:E03

[1115] SEQ ID NO:1068 is the determined cDNA sequence for clone 62117451 R0382:E04

[1116] SEQ ID NO:1069 is the determined cDNA sequence for clone 62117452 R0382:E05

[1117] SEQ ID NO:1070 is the determined cDNA sequence for clone 62117453 R0382:E06

[1118] SEQ ID NO:1071 is the determined cDNA sequence for clone 62117455 R0382:E08

[1119] SEQ ID NO:1072 is the determined cDNA sequence for clone 62117456 R0382:E09

[1120] SEQ ID NO:1073 is the determined cDNA sequence for clone 62117457 R0382:E10

[1121] SEQ ID NO:1074 is the determined cDNA sequence for clone 62117458 R0382:E11

[1122] SEQ ID NO:1075 is the determined cDNA sequence for clone 62117459 R0382:E12

[1123] SEQ ID NO:1076 is the determined cDNA sequence for clone 62117460 R0382:F01

[1124] SEQ ID NO:1077 is the determined cDNA sequence for clone 62117461 R0382:F02

[1125] SEQ ID NO:1078 is the determined cDNA sequence for clone 62117462 R0382: F03

[1126] SEQ ID NO:1079 is the determined cDNA sequence for clone 62117463 R0382:F04

[1127] SEQ ID NO:1080 is the determined cDNA sequence for clone 62117464 R0382:F05

[1128] SEQ ID NO:1081 is the determined cDNA sequence for clone 62117465 R0382:F06

[1129] SEQ ID NO:1082 is the determined cDNA sequence for clone 62117466 R0382:F07

[1130] SEQ ID NO:1083 is the determined cDNA sequence for clone 62117467 R0382:F08

[1131] SEQ ID NO:1084 is the determined cDNA sequence for clone 62117468 R0382:F09

[1132] SEQ ID NO:1085 is the determined cDNA sequence for clone 62117469 R0382:F10

[1133] SEQ ID NO:1086 is the determined cDNA sequence for clone 62117470 R0382:F11

[1134] SEQ ID NO:1087 is the determined cDNA sequence for clone 62117471 R0382:F12

[1135] SEQ ID NO:1088 is the determined cDNA sequence for clone 62117472 R0382:G01

[1136] SEQ ID NO:1089 is the determined cDNA sequence for clone 62117473 R0382:G02

[1137] SEQ ID NO:1090 is the determined cDNA sequence for clone 62117474 R0382:G03

[1138] SEQ ID NO:1091 is the determined cDNA sequence for clone 62117475 R0382:G04

[1139] SEQ ID NO:1092 is the determined cDNA sequence for clone 62117476 R0382:G05

[1140] SEQ ID NO:1093 is the determined cDNA sequence for clone 62117477 R0382:G06

[1141] SEQ ID NO:1094 is the determined cDNA sequence for clone 62117478 R0382:G07

[1142] SEQ ID NO:1095 is the determined cDNA sequence for clone 62117479 R0382:G08

[1143] SEQ ID NO:1096 is the determined cDNA sequence for clone 62117480 R0382:G09

[1144] SEQ ID NO:1097 is the determined cDNA sequence for clone 62117482 R0382:G11

[1145] SEQ ID NO:1098 is the determined cDNA sequence for clone 62117483 R0382:G12

[1146] SEQ ID NO:1099 is the determined cDNA sequence for clone 62117484 R0382:H01

[1147] SEQ ID NO:1100 is the determined cDNA sequence for clone 62117485 R0382:H02

[1148] SEQ ID NO:1101 is the determined cDNA sequence for clone 62117486 R0382:H03

[1149] SEQ ID NO:1102 is the determined cDNA sequence for clone 62117487 R0382:H04

[1150] SEQ ID NO:1103 is the determined cDNA sequence for clone 62117488 R0382:H05

[1151] SEQ ID NO:1104 is the determined cDNA sequence for clone 62117489 R0382:H06

[1152] SEQ ID NO:1105 is the determined cDNA sequence for clone 62117490 R0382:H07

[1153] SEQ ID NO:1106 is the determined cDNA sequence for clone 62117491 R0382:H08

[1154] SEQ ID NO:1107 is the determined cDNA sequence for clone 62117492 R0382:H09

[1155] SEQ ID NO:1108 is the determined cDNA sequence for clone 62117493 R0382:H10

[1156] SEQ ID NO:1109 is the determined cDNA sequence for clone 62117494 R0382:H11

[1157] SEQ ID NO:1110 is the determined cDNA sequence for clone 62117309 R0383:A02

[1158] SEQ ID NO:1111 is the determined cDNA sequence for clone 62117310 R0383:A03

[1159] SEQ ID NO:1112 is the determined cDNA sequence for clone 62117311 R0383:A05

[1160] SEQ ID NO:1113 is the determined cDNA sequence for clone 62117313 R0383:A07

[1161] SEQ ID NO:1114 is the determined cDNA sequence for clone 62117314 R0383:A08

[1162] SEQ ID NO:1115 is the determined cDNA sequence for clone 62117316 R0383:A10

[1163] SEQ ID NO:1116 is the determined cDNA sequence for clone 62117317 R0383:A11

[1164] SEQ ID NO:1117 is the determined cDNA sequence for clone 62117318 R0383:A12

[1165] SEQ ID NO:1118 is the determined cDNA sequence for clone 62117319 R0383:B01

[1166] SEQ ID NO:1119 is the determined cDNA sequence for clone 62117320 R0383 :B02

[1167] SEQ ID NO:1120 is the determined cDNA sequence for clone 62117321 R0383:B03

[1168] SEQ ID NO:1121 is the determined cDNA sequence for clone 62117322 R0383:B04

[1169] SEQ ID NO:1122 is the determined cDNA sequence for clone 62117323 R0383:B05

[1170] SEQ ID NO:1123 is the determined cDNA sequence for clone 62117324 R0383:B06

[1171] SEQ ID NO:1124 is the determined cDNA sequence for clone 62117325 R0383:B07

[1172] SEQ ID NO:1125 is the determined cDNA sequence for clone 62117326 R0383:B08

[1173] SEQ ID NO:1126 is the determined cDNA sequence for clone 62117327 R0383:B09

[1174] SEQ ID NO:1127 is the determined cDNA sequence for clone 62117328 R0383:B 10

[1175] SEQ ID NO:1128 is the determined cDNA sequence for clone 62117329 R0383:B11

[1176] SEQ ID NO:1129 is the determined cDNA sequence for clone 62117330 R0383:B12

[1177] SEQ ID NO:1130 is the determined cDNA sequence for clone 62117331 R0383:C01

[1178] SEQ ID NO:1131 is the determined cDNA sequence for clone 62117332 R0383:C02

[1179] SEQ ID NO:1132 is the determined cDNA sequence for clone 62117333 R0383:C03

[1180] SEQ ID NO:1133 is the determined cDNA sequence for clone 62117334 R0383:C04

[1181] SEQ ID NO:1134 is the determined cDNA sequence for clone 62117335 R0383:C05

[1182] SEQ ID NO:1135 is the determined cDNA sequence for clone 62117336 R0383:C06

[1183] SEQ ID NO:1136 is the determined cDNA sequence for clone 62117337 R0383:C07

[1184] SEQ ID NO:1137 is the determined cDNA sequence for clone 62117338 R0383:C08

[1185] SEQ ID NO:1138 is the determined cDNA sequence for clone 62117339 R0383:C09

[1186] SEQ ID NO:1139 is the determined cDNA sequence for clone 62117340 R0383:C10

[1187] SEQ ID NO:1140 is the determined cDNA sequence for clone 62117341 R0383:C11

[1188] SEQ ID NO:1141 is the determined cDNA sequence for clone 62117342 R0383:C12

[1189] SEQ ID NO:1142 is the determined cDNA sequence for clone 62117343 R0383:D01

[1190] SEQ ID NO:1143 is the determined cDNA sequence for clone 62117344 R0383:D02

[1191] SEQ ID NO:1144 is the determined cDNA sequence for clone 62117345 R0383:D03

[1192] SEQ ID NO:1145 is the determined cDNA sequence for clone 62117346 R0383:D04

[1193] SEQ ID NO:1146 is the determined cDNA sequence for clone 62117347 R0383:D05

[1194] SEQ ID NO:1147 is the determined cDNA sequence for clone 62117348 R0383:D06

[1195] SEQ ID NO:1148 is the determined cDNA sequence for clone 62117349 R0383:D07

[1196] SEQ ID NO:1149 is the determined cDNA sequence for clone 62117350 R0383:D08

[1197] SEQ ID NO:1150 is the determined cDNA sequence for clone 62117351 R0383:D09

[1198] SEQ ID NO:1151 is the determined cDNA sequence for clone 62117352 R0383:D10

[1199] SEQ ID NO:1152 is the determined cDNA sequence for clone 62117353 R0383:D11

[1200] SEQ ID NO:1153 is the determined cDNA sequence for clone 62117354 R0383:D12

[1201] SEQ ID NO:1154 is the determined cDNA sequence for clone 62117355 R0383:E01

[1202] SEQ ID NO:1155 is the determined cDNA sequence for clone 62117356 R0383:E02

[1203] SEQ ID NO:1156 is the determined cDNA sequence for clone 62117357 R0383:E03

[1204] SEQ ID NO:1157 is the determined cDNA sequence for clone 62117358 R0383:E04

[1205] SEQ ID NO:1158 is the determined cDNA sequence for clone 62117359 R0383:E05

[1206] SEQ ID NO:1159 is the determined cDNA sequence for clone 62117360 R0383:E06

[1207] SEQ ID NO:1160 is the determined cDNA sequence for clone 62117361 R0383:E07

[1208] SEQ ID NO:1161 is the determined cDNA sequence for clone 62117362 R0383:E:08

[1209] SEQ ID NO:1162 is the determined cDNA sequence for clone 62117363 R0383:E09

[1210] SEQ ID NO:1163 is the determined cDNA sequence for clone 62117364 R0383:E10

[1211] SEQ ID NO:1164 is the determined cDNA sequence for clone 62117365 R0383:E11

[1212] SEQ ID NO:1165 is the determined cDNA sequence for clone 62117366 R0383:E12

[1213] SEQ ID NO:1166 is the determined cDNA sequence for clone 62117367 R0383:F01

[1214] SEQ ID NO:1167 is the determined cDNA sequence for clone 62117368 R0383:F02

[1215] SEQ ID NO:1168 is the determined cDNA sequence for clone 62117369 R0383:F03

[1216] SEQ ID NO:1169 is the determined cDNA sequence for clone 62117370 R0383:F04

[1217] SEQ ID NO:1170 is the determined cDNA sequence for clone 62117371 R0383:F05

[1218] SEQ ID NO:1171 is the determined cDNA sequence for clone 62117372 R0383:F06

[1219] SEQ ID NO:1172 is the determined cDNA sequence for clone 62117373 R0383:F07

[1220] SEQ ID NO:1173 is the determined cDNA sequence for clone 62117374 R0383:F08

[1221] SEQ ID NO:1174 is the determined cDNA sequence for clone 62117375 R0383:F09

[1222] SEQ ID NO:1175 is the determined cDNA sequence for clone 62117376 R0383:F10

[1223] SEQ ID NO:1176 is the determined cDNA sequence for clone 62117377 R0383:F11

[1224] SEQ ID NO:1177 is the determined cDNA sequence for clone 62117378 R0383:F12

[1225] SEQ ID NO:1178 is the determined cDNA sequence for clone 62117379 R0383:G01

[1226] SEQ ID NO:1179 is the determined cDNA sequence for clone 62117380 R0383:G02

[1227] SEQ ID NO:1180 is the determined cDNA sequence for clone 62117381 R0383:G03

[1228] SEQ ID NO:1181 is the determined cDNA sequence for clone 62117382 R0383:G04

[1229] SEQ ID NO:1182 is the determined cDNA sequence for clone 62117383 R0383:G05

[1230] SEQ ID NO:1183 is the determined cDNA sequence for clone 62117384 R0383:G06

[1231] SEQ ID NO:1184 is the determined cDNA sequence for clone 62117385 R0383:G07

[1232] SEQ ID NO:1185 is the determined cDNA sequence for clone 62117386 R0383:G08

[1233] SEQ ID NO:1186 is the determined cDNA sequence for clone 62117387 R0383:G09

[1234] SEQ ID NO:1187 is the determined cDNA sequence for clone 62117388 R0383:G10

[1235] SEQ ID NO:1188 is the determined cDNA sequence for clone 62117389 R0383 :G11

[1236] SEQ ID NO:1189 is the determined cDNA sequence for clone 62117390 R0383:G12

[1237] SEQ ID NO:1190 is the determined cDNA sequence for clone 62117391 R0383:H01

[1238] SEQ ID NO:1191 is the determined cDNA sequence for clone 62117392 R0383:H02

[1239] SEQ ID NO:1192 is the determined cDNA sequence for clone 62117393 R0383:H03

[1240] SEQ ID NO:1193 is the determined cDNA sequence for clone 62117394 R0383:H04

[1241] SEQ ID NO:1194 is the determined cDNA sequence for clone 62117395 R0383:H05

[1242] SEQ ID NO:1195 is the determined cDNA sequence for clone 62117396 R0383:H06

[1243] SEQ ID NO:1196 is the determined cDNA sequence for clone 62117397 R0383:H07

[1244] SEQ ID NO:1197 is the determined cDNA sequence for clone 62117398 R0383:H08

[1245] SEQ ID NO:1198 is the determined cDNA sequence for clone 62117399 R0383:H09

[1246] SEQ ID NO:1199 is the determined cDNA sequence for clone 62117400 R0383:H10

[1247] SEQ ID NO:1200 is the determined cDNA sequence for clone 62117401 R0383:H11

[1248] SEQ ID NO:1201 is the determined cDNA sequence for clone 62177202 R0384:A02

[1249] SEQ ID NO:1202 is the determined cDNA sequence for clone 62177203 R0384:A03

[1250] SEQ ID NO:1203 is the determined cDNA sequence for clone 62177204 R0384:A05

[1251] SEQ ID NO:1204 is the determined cDNA sequence for clone 62177205 R0384:A06

[1252] SEQ ID NO:1205 is the determined cDNA sequence for clone 62177206 R0384:A07

[1253] SEQ ID NO:1206 is the determined cDNA sequence for clone 62177207 R0384:A08

[1254] SEQ ID NO:1207 is the determined cDNA sequence for clone 62177208 R0384:A09

[1255] SEQ ID NO:1208 is the determined cDNA sequence for clone 62177209 R0384:A10

[1256] SEQ ID NO:1209 is the determined cDNA sequence for clone 62177210 R0384:A11

[1257] SEQ ID NO:1210 is the determined cDNA sequence for clone 62177211 R0384:A12

[1258] SEQ ID NO:1211 is the determined cDNA sequence for clone 62177212 R0384:B01

[1259] SEQ ID NO:1212 is the determined cDNA sequence for clone 62177213 R0384:B02

[1260] SEQ ID NO:1213 is the determined cDNA sequence for clone 62177214 R0384:B03

[1261] SEQ ID NO:1214 is the determined cDNA sequence for clone 62177215 R0384:B04

[1262] SEQ ID NO:1215 is the determined cDNA sequence for clone 62177216 R0384:B05

[1263] SEQ ID NO:1216 is the determined cDNA sequence for clone 62177217 R0384:B06

[1264] SEQ ID NO:1217 is the determined cDNA sequence for clone 62177218 R0384:B07

[1265] SEQ ID NO:1218 is the determined cDNA sequence for clone 62177219 R0384:B08

[1266] SEQ ID NO:1219 is the determined cDNA sequence for clone 62177220 R0384:B09

[1267] SEQ ID NO:1220 is the determined cDNA sequence for clone 62177221 R0384:B10

[1268] SEQ ID NO:1221 is the determined cDNA sequence for clone 62177222 R0384:B11

[1269] SEQ ID NO:1222 is the determined cDNA sequence for clone 62177223 R0384:B12

[1270] SEQ ID NO:1223 is the determined cDNA sequence for clone 62177224 R0384:C01

[1271] SEQ ID NO:1224 is the determined cDNA sequence for clone 62177225 R0384:C02

[1272] SEQ ID NO:1225 is the determined cDNA sequence for clone 62177226 R0384:C03

[1273] SEQ ID NO:1226 is the determined cDNA sequence for clone 62177227 R0384:C04

[1274] SEQ ID NO:1227 is the determined cDNA sequence for clone 62177228 R0384:C05

[1275] SEQ ID NO:1228 is the determined cDNA sequence for clone 62177229 R0384:C06

[1276] SEQ ID NO:1229 is the determined cDNA sequence for clone 62177230 R0384:C07

[1277] SEQ ID NO:1230 is the determined cDNA sequence for clone 62177231 R0384:C08

[1278] SEQ ID NO:1231 is the determined cDNA sequence for clone 62177232 R0384:C09

[1279] SEQ ID NO:1232 is the determined cDNA sequence for clone 62177233 R0384:C10

[1280] SEQ ID NO:1233 is the determined cDNA sequence for clone 62177234 R0384:C11

[1281] SEQ ID NO:1234 is the determined cDNA sequence for clone 62177235 R0384:C12

[1282] SEQ ID NO:1235 is the determined cDNA sequence for clone 62177236 R0384:D01

[1283] SEQ ID NO:1236 is the determined cDNA sequence for clone 62177237 R0384:D02

[1284] SEQ ID NO:1237 is the determined cDNA sequence for clone 62177238 R0384:D03

[1285] SEQ ID NO:1238 is the determined cDNA sequence for clone 62177239 R0384:D04

[1286] SEQ ID NO:1239 is the determined cDNA sequence for clone 62177240 R0384:D05

[1287] SEQ ID NO:1240 is the determined cDNA sequence for clone 62177241 R0384:D06

[1288] SEQ ID NO:1241 is the determined cDNA sequence for clone 62177242 R0384:D07

[1289] SEQ ID NO:1242 is the determined cDNA sequence for clone 62177243 R0384:D08

[1290] SEQ ID NO:1243 is the determined cDNA sequence for clone 62177244 R0384:D09

[1291] SEQ ID NO:1244 is the determined cDNA sequence for clone 62177245 R0384:D10

[1292] SEQ ID NO:1245 is the determined cDNA sequence for clone 62177246 R0384:D11

[1293] SEQ ID NO:1246 is the determined cDNA sequence for clone 62177247 R0384:D12

[1294] SEQ ID NO:1247 is the determined cDNA sequence for clone 62177248 R0384:E01

[1295] SEQ ID NO:1248 is the determined cDNA sequence for clone 62177249 R0384:E02

[1296] SEQ ID NO:1249 is the determined cDNA sequence for clone 62177250 R0384:E03

[1297] SEQ ID NO:1250 is the determined cDNA sequence for clone 62177251 R0384:E04

[1298] SEQ ID NO:1251 is the determined cDNA sequence for clone 62177252 R0384:E05

[1299] SEQ ID NO:1252 is the determined cDNA sequence for clone 62177253 R0384:E06

[1300] SEQ ID NO:1253 is the determined cDNA sequence for clone 62177254 R0384:E07

[1301] SEQ ID NO:1254 is the determined cDNA sequence for clone 62177255 R0384:E08

[1302] SEQ ID NO:1255 is the determined cDNA sequence for clone 62177256 R0384:E09

[1303] SEQ ID NO:1256 is the determined cDNA sequence for clone 62177257 R0384:E06

[1304] SEQ ID NO:1257 is the determined cDNA sequence for clone 62177258 R0384:E11

[1305] SEQ ID NO:1258 is the determined cDNA sequence for clone 62177260 R0384:F01

[1306] SEQ ID NO:1259 is the determined cDNA sequence for clone 62177261 R0384:F02

[1307] SEQ ID NO:1260 is the determined cDNA sequence for clone 62177262 R0384:F03

[1308] SEQ ID NO:1261 is the determined cDNA sequence for clone 62177263 R0384:F04

[1309] SEQ ID NO:1262 is the determined cDNA sequence for clone 62177264 R0384:F05

[1310] SEQ ID NO:1263 is the determined cDNA sequence for clone 62177266 R0384:F07

[1311] SEQ ID NO:1264 is the determined cDNA sequence for clone 62177267 R0384:F08

[1312] SEQ ID NO:1265 is the determined cDNA sequence for clone 62177268 R0384:F09

[1313] SEQ ID NO:1266 is the determined cDNA sequence for clone 62177269 R0384:F10

[1314] SEQ ID NO:1267 is the determined cDNA sequence for clone 62177270 R0384:F11

[1315] SEQ ID NO:1268 is the determined cDNA sequence for clone 62177271 R0384:F12

[1316] SEQ ID NO:1269 is the determined cDNA sequence for clone 62177272 R0384:G01

[1317] SEQ ID NO:1270 is the determined cDNA sequence for clone 62177273 R0384:G02

[1318] SEQ ID NO:1271 is the determined cDNA sequence for clone 62177274 R0384:G03

[1319] SEQ ID NO:1272 is the determined cDNA sequence for clone 62177275 R0384:G04

[1320] SEQ ID NO:1273 is the determined cDNA sequence for clone 62177276 R0384:G05

[1321] SEQ ID NO:1274 is the determined cDNA sequence for clone 62177277 R0384:G06

[1322] SEQ ID NO:1275 is the determined cDNA sequence for clone 62177278 R0384:G07

[1323] SEQ ID NO:1276 is the determined cDNA sequence for clone 62177279 R0384:G08

[1324] SEQ ID NO:1277 is the determined cDNA sequence for clone 62177281 R0384:G10

[1325] SEQ ID NO:1278 is the determined cDNA sequence for clone 62177282 R0384:G11

[1326] SEQ ID NO:1279 is the determined cDNA sequence for clone 62177283 R0384:G12

[1327] SEQ ID NO:1280 is the determined cDNA sequence for clone 62177284 R0384:H01

[1328] SEQ ID NO:1281 is the determined cDNA sequence for clone 62177285 R0384:H02

[1329] SEQ ID NO:1282 is the determined cDNA sequence for clone 62177287 R0384:H04

[1330] SEQ ID NO:1283 is the determined cDNA sequence for clone 62177289 R0384:H06

[1331] SEQ ID NO:1284 is the determined cDNA sequence for clone 62177290 R0384:H07

[1332] SEQ ID NO:1285 is the determined cDNA sequence for clone 62177291 R0384:H08

[1333] SEQ ID NO:1286 is the determined cDNA sequence for clone 62177292 R0384:H09

[1334] SEQ ID NO:1287 is the determined cDNA sequence for clone 62177293 R0384:H10

[1335] SEQ ID NO:1288 is the determined cDNA sequence for clone 62177294 R0384:H11

[1336] SEQ ID NO:1289 is the determined cDNA sequence for clone 62117030 R0385:A02

[1337] SEQ ID NO:1290 is the determined cDNA sequence for clone 62117031 R0385:A03

[1338] SEQ ID NO:1291 is the determined cDNA sequence for clone 62117032 R0385:A05

[1339] SEQ ID NO:1292 is the determined cDNA sequence for clone 62117033 R0385:A06

[1340] SEQ ID NO:1293 is the determined cDNA sequence for clone 62117034 R03845:A07

[1341] SEQ ID NO:1294 is the determined cDNA sequence for clone 62117035 R0385:A08

[1342] SEQ ID NO:1295 is the determined cDNA sequence for clone 62117036 R0385:A09

[1343] SEQ ID NO:1296 is the determined cDNA sequence for clone 62117037 R0385:A10

[1344] SEQ ID NO:1297 is the determined cDNA sequence for clone 62117038 R0385:A11

[1345] SEQ ID NO:1298 is the determined cDNA sequence for clone 62117039 R0385:A12

[1346] SEQ ID NO:1299 is the determined cDNA sequence for clone 62117040 R0385:B01

[1347] SEQ ID NO:1300 is the determined cDNA sequence for clone 62117041 R0385:B02

[1348] SEQ ID NO:1301 is the determined cDNA sequence for clone 62117043 R0385 :B04

[1349] SEQ ID NO:1302 is the determined cDNA sequence for clone 62117044 R0385:B05

[1350] SEQ ID NO:1303 is the determined cDNA sequence for clone 62117045 R0385:B06

[1351] SEQ ID NO:1304 is the determined cDNA sequence for clone 62117046 R0385:B07

[1352] SEQ ID NO:1305 is the determined cDNA sequence for clone 62117047 R0385:B08

[1353] SEQ ID NO:1306 is the determined cDNA sequence for clone 62117048 R0385:B09

[1354] SEQ ID NO:1307 is the determined cDNA sequence for clone 62117049 R0385:B10

[1355] SEQ ID NO:1308 is the determined cDNA sequence for clone 62117050 R0385:B11

[1356] SEQ ID NO:1309 is the determined cDNA sequence for clone 62117051 R0385:B12

[1357] SEQ ID NO:1310 is the determined cDNA sequence for clone 62117052 R0385:C01

[1358] SEQ ID NO:1311 is the determined cDNA sequence for clone 62117053 R0385:C02

[1359] SEQ ID NO:1312 is the determined cDNA sequence for clone 62117055 R0385:C04

[1360] SEQ ID NO:1313 is the determined cDNA sequence for clone 62117056 R0385 :C05

[1361] SEQ ID NO:1314 is the determined cDNA sequence for clone 62117057 R0385:C06

[1362] SEQ ID NO:1315 is the determined cDNA sequence for clone 62117058 R0385:C07

[1363] SEQ ID NO:1316 is the determined cDNA sequence for clone 62117059 R0385:C08

[1364] SEQ ID NO:1317 is the determined cDNA sequence for clone 62117060 R0385:C09

[1365] SEQ ID NO:1318 is the determined cDNA sequence for clone 62117061 R0385:C10

[1366] SEQ ID NO:1319 is the determined cDNA sequence for clone 62117062 R0385:C11

[1367] SEQ ID NO:1320 is the determined cDNA sequence for clone 62117063 R0385:C12

[1368] SEQ ID NO:1321 is the determined cDNA sequence for clone 62117065 R0385:D02

[1369] SEQ ID NO:1322 is the determined cDNA sequence for clone 62117066 R0385:D03

[1370] SEQ ID NO:1323 is the determined cDNA sequence for clone 62117067 R0385:D04

[1371] SEQ ID NO:1324 is the determined cDNA sequence for clone 62117068 R0385:D05

[1372] SEQ ID NO:1325 is the determined cDNA sequence for clone 62117069 R0385:D06

[1373] SEQ ID NO:1326 is the determined cDNA sequence for clone 62117070 R0385:D07

[1374] SEQ ID NO:1327 is the determined cDNA sequence for clone 62117071 R0385:D08

[1375] SEQ ID NO:1328 is the determined cDNA sequence for clone 62117072 R0385:D09

[1376] SEQ ID NO:1329 is the determined cDNA sequence for clone 62117073 R0385:D10

[1377] SEQ ID NO:1330 is the determined cDNA sequence for clone 62117075 R0385:D12

[1378] SEQ ID NO:1331 is the determined cDNA sequence for clone 62117076 R0385:E01

[1379] SEQ ID NO:1332 is the determined cDNA sequence for clone 62117077 R0385:E02

[1380] SEQ ID NO:1333 is the determined cDNA sequence for clone 62117078 R0385:E03

[1381] SEQ ID NO:1334 is the determined cDNA sequence for clone 62117079 R0385:E04

[1382] SEQ ID NO:1335 is the determined cDNA sequence for clone 62117080 R0385:E05

[1383] SEQ ID NO:1336 is the determined cDNA sequence for clone 62117081 R0385:E06

[1384] SEQ ID NO:1337 is the determined cDNA sequence for clone 62117082 R0385:E07

[1385] SEQ ID NO:1338 is the determined cDNA sequence for clone 62117083 R0385:E08

[1386] SEQ ID NO:1339 is the determined cDNA sequence for clone 62117084 R0385:E09

[1387] SEQ ID NO:1340 is the determined cDNA sequence for clone 62117085 R0385:E10

[1388] SEQ ID NO:1341 is the determined cDNA sequence for clone 62117086 R0385:E11

[1389] SEQ ID NO:1342 is the determined cDNA sequence for clone 62117088 R0385:F01

[1390] SEQ ID NO:1343 is the determined cDNA sequence for clone 62117089 R0385:F02

[1391] SEQ ID NO:1344 is the determined cDNA sequence for clone 62117090 R0385:F03

[1392] SEQ ID NO:1345 is the determined cDNA sequence for clone 62117091 R0385:F04

[1393] SEQ ID NO:1346 is the determined cDNA sequence for clone 62117092 R0385:F05

[1394] SEQ ID NO:1347 is the determined cDNA sequence for clone 62117094 R0385:F07

[1395] SEQ ID NO:1348 is the determined cDNA sequence for clone 62117095 R0385:F08

[1396] SEQ ID NO:1349 is the determined cDNA sequence for clone 62117096 R0385:F09

[1397] SEQ ID NO:1350 is the determined cDNA sequence for clone 62117098 R0385:F11

[1398] SEQ ID NO:1351 is the determined cDNA sequence for clone 62117100 R0385:G01

[1399] SEQ ID NO:1352 is the determined cDNA sequence for clone 62117101 R0385: G02

[1400] SEQ ID NO:1353 is the determined cDNA sequence for clone 62117102 R0385:G03

[1401] SEQ ID NO:1354 is the determined cDNA sequence for clone 62117103 R0385:G04

[1402] SEQ ID NO:1355 is the determined cDNA sequence for clone 62117104 R0385:G05

[1403] SEQ ID NO:1356 is the determined cDNA sequence for clone 62117105 R0385:G06

[1404] SEQ ID NO:1357 is the determined cDNA sequence for clone 62117106 R0385:G07

[1405] SEQ ID NO:1358 is the determined cDNA sequence for clone 62117107 R0385:G08

[1406] SEQ ID NO:1359 is the determined cDNA sequence for clone 62117108 R0385:G09

[1407] SEQ ID NO:1360 is the determined cDNA sequence for clone 62117109 R0385:G10

[1408] SEQ ID NO:1361 is the determined cDNA sequence for clone 62117110 R0385:G11

[1409] SEQ ID NO:1362 is the determined cDNA sequence for clone 62117111 R0385:G12

[1410] SEQ ID NO:1363 is the determined cDNA sequence for clone 62117112 R0385:H01

[1411] SEQ ID NO:1364 is the determined cDNA sequence for clone 62117113 R0385:H02

[1412] SEQ ID NO:1365 is the determined cDNA sequence for clone 62117114 R0385:H03

[1413] SEQ ID NO:1366 is the determined cDNA sequence for clone 62117115 R0385:H04

[1414] SEQ ID NO:1367 is the determined cDNA sequence for clone 62117116 R0385:H05

[1415] SEQ ID NO:1368 is the determined cDNA sequence for clone 62117117 R0385:H06

[1416] SEQ ID NO:1369 is the determined cDNA sequence for clone 62117119 R0385:H04

[1417] SEQ ID NO:1370 is the determined cDNA sequence for clone 62117120 R0385:H09

[1418] SEQ ID NO:1371 is the determined cDNA sequence for clone 62117122 R0385:H11

[1419] SEQ ID NO:1372 is the determined cDNA sequence for clone 62117495 R0386:A02

[1420] SEQ ID NO:1373 is the determined cDNA sequence for clone 62117496 R0386:A03

[1421] SEQ ID NO:1374 is the determined cDNA sequence for clone 62117497 R03856:A05

[1422] SEQ ID NO:1375 is the determined cDNA sequence for clone 62117498 R0386:A06

[1423] SEQ ID NO:1376 is the determined cDNA sequence for clone 62117499 R0386:A07

[1424] SEQ ID NO:1377 is the determined cDNA sequence for clone 62117500 R0386:A08

[1425] SEQ ID NO:1378 is the determined cDNA sequence for clone 62117501 R0386:A09

[1426] SEQ ID NO:1379 is the determined cDNA sequence for clone 62117502 R0386:A10

[1427] SEQ ID NO:1380 is the determined cDNA sequence for clone 62117503 R0386:A11

[1428] SEQ ID NO:1381 is the determined cDNA sequence for clone 62117504 R0386:A12

[1429] SEQ ID NO:1382 is the determined cDNA sequence for clone 62117506 R0386:B02

[1430] SEQ ID NO:1383 is the determined cDNA sequence for clone 62117507 R0386:B03

[1431] SEQ ID NO:1384 is the determined cDNA sequence for clone 62117508 R0386:B04

[1432] SEQ ID NO:1385 is the determined cDNA sequence for clone 62117510 R0386:B06

[1433] SEQ ID NO:1386 is the determined cDNA sequence for clone 62117511 R0386:B07

[1434] SEQ ID NO:1387 is the determined cDNA sequence for clone 62117514 R0386:B10

[1435] SEQ ID NO:1388 is the determined cDNA sequence for clone 62117515 R0386:B11

[1436] SEQ ID NO:1389 is the determined cDNA sequence for clone 62117516 R0386:B12

[1437] SEQ ID NO:1390 is the determined cDNA sequence for clone 62117517 R0386:C01

[1438] SEQ ID NO:1391 is the determined cDNA sequence for clone 62117518 R0386:C02

[1439] SEQ ID NO:1392 is the determined cDNA sequence for clone 62117519 R0386:C03

[1440] SEQ ID NO:1393 is the determined cDNA sequence for clone 62117520 R0386:C04

[1441] SEQ ID NO:1394 is the determined cDNA sequence for clone 62117521 R0386:C05

[1442] SEQ ID NO:1395 is the determined cDNA sequence for clone 62117522 R0386:C06

[1443] SEQ ID NO:1396 is the determined cDNA sequence for clone 62117523 R0386:C07

[1444] SEQ ID NO:1397 is the determined cDNA sequence for clone 62117524 R0386:C08

[1445] SEQ ID NO:1398 is the determined cDNA sequence for clone 62117525 R0386:C09

[1446] SEQ ID NO:1399 is the determined cDNA sequence for clone 62117526 R0386:C10

[1447] SEQ ID NO:1400 is the determined cDNA sequence for clone 62117527 R0386:C11

[1448] SEQ ID NO:1401 is the determined cDNA sequence for clone 62117528 R0386:C12

[1449] SEQ ID NO:1402 is the determined cDNA sequence for clone 62117529 R0386:D01

[1450] SEQ ID NO:1403 is the determined cDNA sequence for clone 62117530 R0386:D02

[1451] SEQ ID NO:1404 is the determined cDNA sequence for clone 62117531 R0386:D03

[1452] SEQ ID NO:1405 is the determined cDNA sequence for clone 62117533 R0386:D05

[1453] SEQ ID NO:1406 is the determined cDNA sequence for clone 62117534 R0386:D06

[1454] SEQ ID NO:1407 is the determined cDNA sequence for clone 62117535 R0386:D07

[1455] SEQ ID NO:1408 is the determined cDNA sequence for clone 62117536 R0386:D02

[1456] SEQ ID NO:1409 is the determined cDNA sequence for clone 62117537 R0386:D09

[1457] SEQ ID NO:1410 is the determined cDNA sequence for clone 62117538 R0386:D10

[1458] SEQ ID NO:1411 is the determined cDNA sequence for clone 62117539 R0386:D11

[1459] SEQ ID NO:1412 is the determined cDNA sequence for clone 62117540 R0386:D12

[1460] SEQ ID NO:1413 is the determined cDNA sequence for clone 62117541 R0386:E01

[1461] SEQ ID NO:1414 is the determined cDNA sequence for clone 62117542 R0386:E02

[1462] SEQ ID NO:1415 is the determined cDNA sequence for clone 62117545 R0386:E05

[1463] SEQ ID NO:1416 is the determined cDNA sequence for clone 62117546 R0386:E06

[1464] SEQ ID NO:1417 is the determined cDNA sequence for clone 62117547 R0386:E07

[1465] SEQ ID NO:1418 is the determined cDNA sequence for clone 62117548 R0386:E08

[1466] SEQ ID NO:1419 is the determined cDNA sequence for clone 62117549 R0386:E09

[1467] SEQ ID NO:1420 is the determined cDNA sequence for clone 62117550 R0386:E10

[1468] SEQ ID NO:1421 is the determined cDNA sequence for clone 62117551 R0386:E11

[1469] SEQ ID NO:1422 is the determined cDNA sequence for clone 62117552 R0386:E12

[1470] SEQ ID NO:1423 is the determined cDNA sequence for clone 62117553 R0386:F01

[1471] SEQ ID NO:1424 is the determined cDNA sequence for clone 62117554 R0386:F02

[1472] SEQ ID NO:1425 is the determined cDNA sequence for clone 62117556 R0386:F04

[1473] SEQ ID NO:1426 is the determined cDNA sequence for clone 62117557 R0386:F05

[1474] SEQ ID NO:1427 is the determined cDNA sequence for clone 62117558 R0386:F06

[1475] SEQ ID NO:1428 is the determined cDNA sequence for clone 62117559 R0386:F07

[1476] SEQ ID NO:1429 is the determined cDNA sequence for clone 62117560 R0386:F08

[1477] SEQ ID NO:1430 is the determined cDNA sequence for clone 62117561 R0386:F09

[1478] SEQ ID NO:1431 is the determined cDNA sequence for clone 62117563 R0386:F11

[1479] SEQ ID NO:1432 is the determined cDNA sequence for clone 62117564 R0386:F12

[1480] SEQ ID NO:1433 is the determined cDNA sequence for clone 62117566 R0386:G02

[1481] SEQ ID NO:1434 is the determined cDNA sequence for clone 62117567 R0386:G03

[1482] SEQ ID NO:1435 is the determined cDNA sequence for clone 62117568 R0386:G04

[1483] SEQ ID NO:1436 is the determined cDNA sequence for clone 62117569 R0386:F05

[1484] SEQ ID NO:1437 is the determined cDNA sequence for clone 62117570 R0386:G06

[1485] SEQ ID NO:1438 is the determined cDNA sequence for clone 62117571 R0386:G07

[1486] SEQ ID NO:1439 is the determined cDNA sequence for clone 62117572 R0386:G08

[1487] SEQ ID NO:1440 is the determined cDNA sequence for clone 62117573 R0386:G09

[1488] SEQ ID NO:1441 is the determined cDNA sequence for clone 62117574 R0386:G10

[1489] SEQ ID NO:1442 is the determined cDNA sequence for clone 62117575 R0386:G11

[1490] SEQ ID NO:1443 is the determined cDNA sequence for clone 62117576 R0386:G12

[1491] SEQ ID NO:1444 is the determined cDNA sequence for clone 62117579 R0386:H03

[1492] SEQ ID NO:1445 is the determined cDNA sequence for clone 62117580 R0386:H04

[1493] SEQ ID NO:1446 is the determined cDNA sequence for clone 62117581 R0386:H05

[1494] SEQ ID NO:1447 is the determined cDNA sequence for clone 62117582 R0386:H06

[1495] SEQ ID NO:1448 is the determined cDNA sequence for clone 62117583 R0386:H07

[1496] SEQ ID NO:1449 is the determined cDNA sequence for clone 62117584 R0386:H08

[1497] SEQ ID NO:1450 is the determined cDNA sequence for clone 62117585 R0386:H09

[1498] SEQ ID NO:1451 is the determined cDNA sequence for clone 62117586 R0386:H10

[1499] SEQ ID NO:1452 is the determined cDNA sequence for clone 62117587 R0386:H11

[1500] SEQ ID NO:1453 is the determined cDNA sequence for clone 62227248 R0387:A05

[1501] SEQ ID NO:1454 is the determined cDNA sequence for clone 62227249 R0387:A06

[1502] SEQ ID NO:1455 is the determined cDNA sequence for clone 62227250 R0387:A07

[1503] SEQ ID NO:1456 is the determined cDNA sequence for clone 62227251 R0387:A8

[1504] SEQ ID NO:1457 is the determined cDNA sequence for clone 62227252 R0387:A09

[1505] SEQ ID NO:1458 is the determined cDNA sequence for clone 62227253 R0387:A10

[1506] SEQ ID NO:1459 is the determined cDNA sequence for clone 62227254 R0387:A11

[1507] SEQ ID NO:1460 is the determined cDNA sequence for clone 62227255 R0387:A12

[1508] SEQ ID NO:1461 is the determined cDNA sequence for clone 62227257 R0387:B02

[1509] SEQ ID NO:1462 is the determined cDNA sequence for clone 62227258 R0387:B03

[1510] SEQ ID NO:1463 is the determined cDNA sequence for clone 62227259 R0387:B04

[1511] SEQ ID NO:1464 is the determined cDNA sequence for clone 62227260 R0387:B05

[1512] SEQ ID NO:1465 is the determined cDNA sequence for clone 62227261 R0387:B06

[1513] SEQ ID NO:1466 is the determined cDNA sequence for clone 62227262 R0387:B07

[1514] SEQ ID NO:1467 is the determined cDNA sequence for clone 62227263 R0387:B08

[1515] SEQ ID NO:1468 is the determined cDNA sequence for clone 62227264 R0387:B09

[1516] SEQ ID NO:1469 is the determined cDNA sequence for clone 62227265 R0387:B10

[1517] SEQ ID NO:1470 is the determined cDNA sequence for clone 62227266 R0387:B11

[1518] SEQ ID NO:1471 is the determined cDNA sequence for clone 62227267 R0387:B 12

[1519] SEQ ID NO:1472 is the determined cDNA sequence for clone 62227268 R0387:C01

[1520] SEQ ID NO:1473 is the determined cDNA sequence for clone 62227269 R0387:C02

[1521] SEQ ID NO:1474 is the determined cDNA sequence for clone 62227270 R0387:C03

[1522] SEQ ID NO:1475 is the determined cDNA sequence for clone 62227271 R0387:C04

[1523] SEQ ID NO:1476 is the determined cDNA sequence for clone 62227272 R0387:C05

[1524] SEQ ID NO:1477 is the determined cDNA sequence for clone 62227274 R0387:C07

[1525] SEQ ID NO:1478 is the determined cDNA sequence for clone 62227275 R0387:C08

[1526] SEQ ID NO:1479 is the determined cDNA sequence for clone 62227276 R0387:C09

[1527] SEQ ID NO:1480 is the determined cDNA sequence for clone 62227277 R0387:C10

[1528] SEQ ID NO:1481 is the determined cDNA sequence for clone 62227278 R0387:C11

[1529] SEQ ID NO:1482 is the determined cDNA sequence for clone 62227279 R0387:C12

[1530] SEQ ID NO:1483 is the determined cDNA sequence for clone 62227280 R0387:D01

[1531] SEQ ID NO:1484 is the determined cDNA sequence for clone 62227281 R0387:D02

[1532] SEQ ID NO:1485 is the determined cDNA sequence for clone 62227283 R0387:D04

[1533] SEQ ID NO:1486 is the determined cDNA sequence for clone 62227285 R0387:D06

[1534] SEQ ID NO:1487 is the determined cDNA sequence for clone 62227286 R0387:D07

[1535] SEQ ID NO:1488 is the determined cDNA sequence for clone 62227289 R0387:D10

[1536] SEQ ID NO:1489 is the determined cDNA sequence for clone 62227290 R0387:D11

[1537] SEQ ID NO:1490 is the determined cDNA sequence for clone 62227291 R0387:D12

[1538] SEQ ID NO:1491 is the determined cDNA sequence for clone 62227294 R0387:E03

[1539] SEQ ID NO:1492 is the determined cDNA sequence for clone 62227295 R0387:E04

[1540] SEQ ID NO:1493 is the determined cDNA sequence for clone 62227296 R0387:E05

[1541] SEQ ID NO:1494 is the determined cDNA sequence for clone 62227298 R0387:E07

[1542] SEQ ID NO:1495 is the determined cDNA sequence for clone 62227299 R0387:E08

[1543] SEQ ID NO:1496 is the determined cDNA sequence for clone 62227300 R0387:E09

[1544] SEQ ID NO:1497 is the determined cDNA sequence for clone 62227301 R0387:E10

[1545] SEQ ID NO:1498 is the determined cDNA sequence for clone 6222732 R0387:E11

[1546] SEQ ID NO:1499 is the determined cDNA sequence for clone 62227304 R0387:F01

[1547] SEQ ID NO:1500 is the determined cDNA sequence for clone 62227305 R0387:F02

[1548] SEQ ID NO:1501 is the determined cDNA sequence for clone 62227307 R0387:F04

[1549] SEQ ID NO:1502 is the determined cDNA sequence for clone 62227308 R0387:F05

[1550] SEQ ID NO:1503 is the determined cDNA sequence for clone 62227309 R0387:F06

[1551] SEQ ID NO:1504 is the determined cDNA sequence for clone 62227310 R0387:F07

[1552] SEQ ID NO:1505 is the determined cDNA sequence for clone 62227311 R0387:F08

[1553] SEQ ID NO:1506 is the determined cDNA sequence for clone 62227312 R0387:F09

[1554] SEQ ID NO:1507 is the determined cDNA sequence for clone 62227313 R0387:F10

[1555] SEQ ID NO:1508 is the determined cDNA sequence for clone 62227314 R0387:F11

[1556] SEQ ID NO:1509 is the determined cDNA sequence for clone 62227315 R0387:F12

[1557] SEQ ID NO:1510 is the determined cDNA sequence for clone 62227316 R0387:G01

[1558] SEQ ID NO:1511 is the determined cDNA sequence for clone 62227317 R0387:G02

[1559] SEQ ID NO:1512 is the determined cDNA sequence for clone 62227320 R0387:G05

[1560] SEQ ID NO:1513 is the determined cDNA sequence for clone 62227321 R0387:G06

[1561] SEQ ID NO:1514 is the determined cDNA sequence for clone 62227323 R0387:G08

[1562] SEQ ID NO:1515 is the determined cDNA sequence for clone 62227324 R0387:G09

[1563] SEQ ID NO:1516 is the determined cDNA sequence for clone 62227326 R0387:G11

[1564] SEQ ID NO:1517 is the determined cDNA sequence for clone 62227327 R0387:G12

[1565] SEQ ID NO:1518 is the determined cDNA sequence for clone 62227328 R0387:H01

[1566] SEQ ID NO:1519 is the determined cDNA sequence for clone 62227329 R0387:H02

[1567] SEQ ID NO:1520 is the determined cDNA sequence for clone 62227331 R0387:H04

[1568] SEQ ID NO:1521 is the determined cDNA sequence for clone 62227332 R0387:H05

[1569] SEQ ID NO:1522 is the determined cDNA sequence for clone 62227333 R0387:H06

[1570] SEQ ID NO:1523 is the determined cDNA sequence for clone 62227334 R0387:H07

[1571] SEQ ID NO:1524 is the determined cDNA sequence for clone 62227335 R0387:H08

[1572] SEQ ID NO:1525 is the determined cDNA sequence for clone 62227336 R0387:H09

[1573] SEQ ID NO:1526 is the determined cDNA sequence for clone 62227338 R0387:H11

[1574] SEQ ID NO:1527 is the determined cDNA sequence for clone 62226968 R0387:A03

[1575] SEQ ID NO:1528 is the determined cDNA sequence for clone 62226969 R0388:A05

[1576] SEQ ID NO:1529 is the determined cDNA sequence for clone 62226970 R0388:A06

[1577] SEQ ID NO:1530 is the determined cDNA sequence for clone 62226971 R0388:A07

[1578] SEQ ID NO:1531 is the determined cDNA sequence for clone 62226972 R0388:A08

[1579] SEQ ID NO:1532 is the determined cDNA sequence for clone 62226973 R0388:A09

[1580] SEQ ID NO:1533 is the determined cDNA sequence for clone 62226974 R0388:A10

[1581] SEQ ID NO:1534 is the determined cDNA sequence for clone 62226975 R0388:A11

[1582] SEQ ID NO:1535 is the determined cDNA sequence for clone 62226976 R0388:A12

[1583] SEQ ID NO:1536 is the determined cDNA sequence for clone 62226977 R0388:B01

[1584] SEQ ID NO:1537 is the determined cDNA sequence for clone 62226978 R0388:B02

[1585] SEQ ID NO:1538 is the determined cDNA sequence for clone 62226980 R0388:B04

[1586] SEQ ID NO:1539 is the determined cDNA sequence for clone 62226982 R0388:B06

[1587] SEQ ID NO:1540 is the determined cDNA sequence for clone 62226984 R0388:B08

[1588] SEQ ID NO:1541 is the determined cDNA sequence for clone 62226985 R0388:B09

[1589] SEQ ID NO:1542 is the determined cDNA sequence for clone 62226986 R0388:B10

[1590] SEQ ID NO:1543 is the determined cDNA sequence for clone 62226987 R0388:B11

[1591] SEQ ID NO:1544 is the determined cDNA sequence for clone 62226988 R0388:B12

[1592] SEQ ID NO:1545 is the determined cDNA sequence for clone 62226989 R0388: C01

[1593] SEQ ID NO:1546 is the determined cDNA sequence for clone 62226990 R0388:C02

[1594] SEQ ID NO:1547 is the determined cDNA sequence for clone 62226991 R0388: C03

[1595] SEQ ID NO:1548 is the determined cDNA sequence for clone 62226992 R0388:C04

[1596] SEQ ID NO:1549 is the determined cDNA sequence for clone 62226993 R0388:C05

[1597] SEQ ID NO:1550 is the determined cDNA sequence for clone 62226994 R0388:C06

[1598] SEQ ID NO:1551 is the determined cDNA sequence for clone 62226995 R0388:C07

[1599] SEQ ID NO:1552 is the determined cDNA sequence for clone 62226996 R0388:C08

[1600] SEQ ID NO:1553 is the determined cDNA sequence for clone 62226997 R0388:C09

[1601] SEQ ID NO:1554 is the determined cDNA sequence for clone 62226998 R0388:C10

[1602] SEQ ID NO:1555 is the determined cDNA sequence for clone 62226999 R0388:C11

[1603] SEQ ID NO:1556 is the determined cDNA sequence for clone 62227000 R0388:C12

[1604] SEQ ID NO:1557 is the determined cDNA sequence for clone 62227001 R0388:D01

[1605] SEQ ID NO:1558 is the determined cDNA sequence for clone 62227003 R0388:D03

[1606] SEQ ID NO:1559 is the determined cDNA sequence for clone 62227004 R0388:D04

[1607] SEQ ID NO:1560 is the determined cDNA sequence for clone 62227005 R0388:D05

[1608] SEQ ID NO:1561 is the determined cDNA sequence for clone 62227006 R0388:D06

[1609] SEQ ID NO:1562 is the determined cDNA sequence for clone 62227007 R0388:D07

[1610] SEQ ID NO:1563 is the determined cDNA sequence for clone 62227008 R0388:D08

[1611] SEQ ID NO:1564 is the determined cDNA sequence for clone 62227009 R0388:D09

[1612] SEQ ID NO:1565 is the determined cDNA sequence for clone 62227011 R0388:D11

[1613] SEQ ID NO:1566 is the determined cDNA sequence for clone 62227012 R0388:D12

[1614] SEQ ID NO:1567 is the determined cDNA sequence for clone 62227013 R0388:E01

[1615] SEQ ID NO:1568 is the determined cDNA sequence for clone 62227015 R0388:E03

[1616] SEQ ID NO:1569 is the determined cDNA sequence for clone 62227018 R0388:E06

[1617] SEQ ID NO:1570 is the determined cDNA sequence for clone 62227019 R0388:E:07

[1618] SEQ ID NO:1571 is the determined cDNA sequence for clone 62227020 R0388:E08

[1619] SEQ ID NO:1572 is the determined cDNA sequence for clone 62227022 R0388:E10

[1620] SEQ ID NO:1573 is the determined cDNA sequence for clone 62227023 R0388:E11

[1621] SEQ ID NO:1574 is the determined cDNA sequence for clone 62227024 R0388:E12

[1622] SEQ ID NO:1575 is the determined cDNA sequence for clone 62227029 R0388:F:05

[1623] SEQ ID NO:1576 is the determined cDNA sequence for clone 62227030 R0388:F06

[1624] SEQ ID NO:1577 is the determined cDNA sequence for clone 62227031 R0388.:F07

[1625] SEQ ID NO:1578 is the determined cDNA sequence for clone 62227032 R0388:F08

[1626] SEQ ID NO:1579 is the determined cDNA sequence for clone 62227033 R0388:F09

[1627] SEQ ID NO:1580 is the determined cDNA sequence for clone 62227034 R0388:F10

[1628] SEQ ID NO:1581 is the determined cDNA sequence for clone 62227035 R0388:F11

[1629] SEQ ID NO:1582 is the determined cDNA sequence for clone 62227036 R0388:F12

[1630] SEQ ID NO:1583 is the determined cDNA sequence for clone 62227037 R0388:G01

[1631] SEQ ID NO:1584 is the determined cDNA sequence for clone 62227038 R0388:G02

[1632] SEQ ID NO:1585 is the determined cDNA sequence for clone 62227040 R0388: G04

[1633] SEQ ID NO:1586 is the determined cDNA sequence for clone 62227042 R0388:G06

[1634] SEQ ID NO:1587 is the determined cDNA sequence for clone 62227044 R0388:G08

[1635] SEQ ID NO:1588 is the determined cDNA sequence for clone 62227045 R0388:G09

[1636] SEQ ID NO:1589 is the determined cDNA sequence for clone 62227047 R0388:G11

[1637] SEQ ID NO:1590 is the determined cDNA sequence for clone 62227048 R0388:G12

[1638] SEQ ID NO:1591 is the determined cDNA sequence for clone 62227049 R0388:H01

[1639] SEQ ID NO:1592 is the determined cDNA sequence for clone 62227051 R0388:H03

[1640] SEQ ID NO:1593 is the determined cDNA sequence for clone 62227052 R0388:H04

[1641] SEQ ID NO:1594 is the determined cDNA sequence for clone 62227053 R0388:H05

[1642] SEQ ID NO:1595 is the determined cDNA sequence for clone 62227054 R0388:H06

[1643] SEQ ID NO:1596 is the determined cDNA sequence for clone 62227055 R0388:H07

[1644] SEQ ID NO:1597 is the determined cDNA sequence for clone 62227056 R0388:H08

[1645] SEQ ID NO:1598 is the determined cDNA sequence for clone 62227057 R0388:H09

[1646] SEQ ID NO:1599 is the determined cDNA sequence for clone 62227058 R0388:H10

[1647] SEQ ID NO:1600 is the determined cDNA sequence for clone 62227059 R0388:H11

[1648] SEQ ID NO:1601 is the determined cDNA sequence for clone 62227432 R0389:A02

[1649] SEQ ID NO:1602 is the determined cDNA sequence for clone 62227433 R0389:A03

[1650] SEQ ID NO:1603 is the determined cDNA sequence for clone 62227437 R0389:A08

[1651] SEQ ID NO:1604 is the determined cDNA sequence for clone 62227438 R0389:A09

[1652] SEQ ID NO:1605 is the determined cDNA sequence for clone 62227439 R0389:A10

[1653] SEQ ID NO:1606 is the determined cDNA sequence for clone 62227440 R0389:A11

[1654] SEQ ID NO:1607 is the determined cDNA sequence for clone 62227441 R0389:A12

[1655] SEQ ID NO:1608 is the determined cDNA sequence for clone 62227442 R0389:B01

[1656] SEQ ID NO:1609 is the determined cDNA sequence for clone 62227443 R0389:B02

[1657] SEQ ID NO:1610 is the determined cDNA sequence for clone 62227444 R0389:B03

[1658] SEQ ID NO:1611 is the determined cDNA sequence for clone 62227445 R0389:B04

[1659] SEQ ID NO:1612 is the determined cDNA sequence for clone 62227446 R0389:B05

[1660] SEQ ID NO:1613 is the determined cDNA sequence for clone 62227447 R0389:B06

[1661] SEQ ID NO:1614 is the determined cDNA sequence for clone 62227448 R0389:B07

[1662] SEQ ID NO:1615 is the determined cDNA sequence for clone 62227450 R0389:B09

[1663] SEQ ID NO:1616 is the determined cDNA sequence for clone 62227451 R0389:B10

[1664] SEQ ID NO:1617 is the determined cDNA sequence for clone 62227452 R0389:B11

[1665] SEQ ID NO:1618 is the determined cDNA sequence for clone 62227453 R0389:B12

[1666] SEQ ID NO:1619 is the determined cDNA sequence for clone 62227456 R0389:C03

[1667] SEQ ID NO:1620 is the determined cDNA sequence for clone 62227457 R0389:C04

[1668] SEQ ID NO:1621 is the determined cDNA sequence for clone 62227458 R0389:C05

[1669] SEQ ID NO:1622 is the determined cDNA sequence for clone 62227459 R0389:C06

[1670] SEQ ID NO:1623 is the determined cDNA sequence for clone 62227460 R0389:C07

[1671] SEQ ID NO:1624 is the determined cDNA sequence for clone 62227461 R0389:C08

[1672] SEQ ID NO:1625 is the determined cDNA sequence for clone 62227462 R0389:C09

[1673] SEQ ID NO:1626 is the determined cDNA sequence for clone 62227463 R0389:C10

[1674] SEQ ID NO:1627 is the determined cDNA sequence for clone 62227464 R0389:C11

[1675] SEQ ID NO:1628 is the determined cDNA sequence for clone 62227465 R0389:C12

[1676] SEQ ID NO:1629 is the determined cDNA sequence for clone 62227466 R0389:D01

[1677] SEQ ID NO:1630 is the determined cDNA sequence for clone 62227468 R0389:D03

[1678] SEQ ID NO:1631 is the determined cDNA sequence for clone 62227469 R0389:D04

[1679] SEQ ID NO:1632 is the determined cDNA sequence for clone 62227470 R0389:D05

[1680] SEQ ID NO:1633 is the determined cDNA sequence for clone 62227471 R0389:D06

[1681] SEQ ID NO:1634 is the determined cDNA sequence for clone 62227472 R0389:D07

[1682] SEQ ID NO:1635 is the determined cDNA sequence for clone 62227473 R0389:D08

[1683] SEQ ID NO:1636 is the determined cDNA sequence for clone 62227475 R0389:D10

[1684] SEQ ID NO:1637 is the determined cDNA sequence for clone 62227476 R0389:D11

[1685] SEQ ID NO:1638 is the determined cDNA sequence for clone 62227477 R0389:D12

[1686] SEQ ID NO:1639 is the determined cDNA sequence for clone 62227478 R0389:E01

[1687] SEQ ID NO:1640 is the determined cDNA sequence for clone 62227479 R0389:E02

[1688] SEQ ID NO:1641 is the determined cDNA sequence for clone 62227480 R0389:E03

[1689] SEQ ID NO:1642 is the determined cDNA sequence for clone 62227481 R0389:E04

[1690] SEQ ID NO:1643 is the determined cDNA sequence for clone 62227482 R0389:E05

[1691] SEQ ID NO:1644 is the determined cDNA sequence for clone 62227483 R0389:E06

[1692] SEQ ID NO:1645 is the determined cDNA sequence for clone 62227484 R0389:E07

[1693] SEQ ID NO:1646 is the determined cDNA sequence for clone 62227485 R0389:E08

[1694] SEQ ID NO:1647 is the determined cDNA sequence for clone 62227487 R0389:E10

[1695] SEQ ID NO:1648 is the determined cDNA sequence for clone 62227488 R0389:E11

[1696] SEQ ID NO:1649 is the determined cDNA sequence for clone 62227490 R0389:F01

[1697] SEQ ID NO:1650 is the determined cDNA sequence for clone 62227491 R0389:F02

[1698] SEQ ID NO:1651 is the determined cDNA sequence for clone 62227492 R0389:F03

[1699] SEQ ID NO:1652 is the determined cDNA sequence for clone 62227493 R0389:F04

[1700] SEQ ID NO:1653 is the determined cDNA sequence for clone 62227495 R0389:F06

[1701] SEQ ID NO:1654 is the determined cDNA sequence for clone 62227496 R0389:F7

[1702] SEQ ID NO:1655 is the determined cDNA sequence for clone 62227497 R0389:F08

[1703] SEQ ID NO:1656 is the determined cDNA sequence for clone 62227498 R0389:F09

[1704] SEQ ID NO:1657 is the determined cDNA sequence for clone 62227499 R0389:F10

[1705] SEQ ID NO:1658 is the determined cDNA sequence for clone 62227500 R0389:F11

[1706] SEQ ID NO:1659 is the determined cDNA sequence for clone 62227501 R0389:F12

[1707] SEQ ID NO:1660 is the determined cDNA sequence for clone 62227502 R0389:G01

[1708] SEQ ID NO:1661 is the determined cDNA sequence for clone 62227505 R0389:G04

[1709] SEQ ID NO:1662 is the determined cDNA sequence for clone 62227507 R0389:G06

[1710] SEQ ID NO:1663 is the determined cDNA sequence for clone 62227508 R0389:G07

[1711] SEQ ID NO:1664 is the determined cDNA sequence for clone 62227511 R0389:G10

[1712] SEQ ID NO:1665 is the determined cDNA sequence for clone 62227512 R0389:G11

[1713] SEQ ID NO:1666 is the determined cDNA sequence for clone 62227515 R0389:H02

[1714] SEQ ID NO:1667 is the determined cDNA sequence for clone 62227516 R0389:H03

[1715] SEQ ID NO:1668 is the determined cDNA sequence for clone 62227517 R0389:H04

[1716] SEQ ID NO:1669 is the determined cDNA sequence for clone 62227519 R0389:H06

[1717] SEQ ID NO:1670 is the determined cDNA sequence for clone 62227520 R0389:H07

[1718] SEQ ID NO:1671 is the determined cDNA sequence for clone 62227521 R0389:H08

[1719] SEQ ID NO:1672 is the determined cDNA sequence for clone 62227522 R0389:H09

[1720] SEQ ID NO:1673 is the determined cDNA sequence for clone 62227523 R0389:H10

[1721] SEQ ID NO:1674 is the determined cDNA sequence for clone 62227524 R0389:H11

[1722] SEQ ID NO:1675 is the determined cDNA sequence for clone 62227526 R0390:A03

[1723] SEQ ID NO:1676 is the determined cDNA sequence for clone 62227527 R0390:A05

[1724] SEQ ID NO:1677 is the determined cDNA sequence for clone 62227528 R0390:A06

[1725] SEQ ID NO:1678 is the determined cDNA sequence for clone 62227529 R0390:A07

[1726] SEQ ID NO:1679 is the determined cDNA sequence for clone 62227530 R0390:A08

[1727] SEQ ID NO:1680 is the determined cDNA sequence for clone 62227532 R0390:A10

[1728] SEQ ID NO:1681 is the determined cDNA sequence for clone 62227533 R0390:A11

[1729] SEQ ID NO:1682 is the determined cDNA sequence for clone 62227535 R0390:B01

[1730] SEQ ID NO:1683 is the determined cDNA sequence for clone 62227536 R0390:B02

[1731] SEQ ID NO:1684 is the determined cDNA sequence for clone 62227537 R0390:B03

[1732] SEQ ID NO:1685 is the determined cDNA sequence for clone 62227538 R0390:B04

[1733] SEQ ID NO:1686 is the determined cDNA sequence for clone 62227541 R0390:B07

[1734] SEQ ID NO:1687 is the determined cDNA sequence for clone 62227542 R0390:B08

[1735] SEQ ID NO:1688 is the determined cDNA sequence for clone 62227543 R0390:B09

[1736] SEQ ID NO:1689 is the determined cDNA sequence for clone 62227544 R0390:B10

[1737] SEQ ID NO:1690 is the determined cDNA sequence for clone 62227545 R0390:B01

[1738] SEQ ID NO:1691 is the determined :DNA sequence for clone 62227546 R0390:B12

[1739] SEQ ID NO:1692 is the determined cDNA sequence for clone 62227547 R0390:C01

[1740] SEQ ID NO:1693 is the determined cDNA sequence for clone 62227548 R0390:C02

[1741] SEQ ID NO:1694 is the determined cDNA sequence for clone 62227549 R0390:C03

[1742] SEQ ID NO:1695 is the determined cDNA sequence for clone 62227550 R0390:C04

[1743] SEQ ID NO:1696 is the determined cDNA sequence for clone 62227551 R0390:C05

[1744] SEQ ID NO:1697 is the determined cDNA sequence for clone 62227552 R0390:C06

[1745] SEQ ID NO:1698 is the determined cDNA sequence for clone 62227553 R0390:C07

[1746] SEQ ID NO:1699 is the determined cDNA sequence for clone 62227554 R0390:C08

[1747] SEQ ID NO:1700 is the determined cDNA sequence for clone 62227555 R0390:C09

[1748] SEQ ID NO:1701 is the determined cDNA sequence for clone 62227556 R0390:C10

[1749] SEQ ID NO:1702 is the determined cDNA sequence for clone 62227557 R0390:C11

[1750] SEQ ID NO:1703 is the determined cDNA sequence for clone 62227558 R0390:C12

[1751] SEQ ID NO:1704 is the determined cDNA sequence for clone 62227559 R0390:D01

[1752] SEQ ID NO:1705 is the determined cDNA sequence for clone 62227560 R0390:D02

[1753] SEQ ID NO:1706 is the determined cDNA sequence for clone 62227562 R0390:D04

[1754] SEQ ID NO:1707 is the determined cDNA sequence for clone 62227563 R0390:D05

[1755] SEQ ID NO:1708 is the determined cDNA sequence for clone 62227564 R0390:D06

[1756] SEQ ID NO:1709 is the determined cDNA sequence for clone 62227565 R0390:D07

[1757] SEQ ID NO:1710 is the determined cDNA sequence for clone 62227566 R0390:D08

[1758] SEQ ID NO:1711 is the determined cDNA sequence for clone 62227569 R0390:D11

[1759] SEQ ID NO:1712 is the determined cDNA sequence for clone 62227570 R0390:D12

[1760] SEQ ID NO:1713 is the determined cDNA sequence for clone 62227571 R0390:E01

[1761] SEQ ID NO:1714 is the determined cDNA sequence for clone 62227572 R0390:E02

[1762] SEQ ID NO:1715 is the determined cDNA sequence for clone 62227573 R0390:E03

[1763] SEQ ID NO:1716 is the determined cDNA sequence for clone 62227575 R0390:E05

[1764] SEQ ID NO:1717 is the determined cDNA sequence for clone 62227576 R0390:E06

[1765] SEQ ID NO:1718 is the determined cDNA sequence for clone 62227577 R0390:E07

[1766] SEQ ID NO:1719 is the determined cDNA sequence for clone 62227578 R0390:E08

[1767] SEQ ID NO:1720 is the determined cDNA sequence for clone 62227581 R0390:E11

[1768] SEQ ID NO:1721 is the determined cDNA sequence for clone 62227583 R0390:F01

[1769] SEQ ID NO:1722 is the determined cDNA sequence for clone 62227584 R0390:F02

[1770] SEQ ID NO:1723 is the determined cDNA sequence for clone 62227585 R0390:F03

[1771] SEQ ID NO:1724 is the determined cDNA sequence for clone 62227586 R0390:F04

[1772] SEQ ID NO:1725 is the determined cDNA sequence for clone 62227589 R0390:F07

[1773] SEQ ID NO:1726 is the determined cDNA sequence for clone 62227590 R0390:F08

[1774] SEQ ID NO:1727 is the determined cDNA sequence for clone 62227591 R0390:F09

[1775] SEQ ID NO:1728 is the determined cDNA sequence for clone 62227593 R0390:F11

[1776] SEQ ID NO:1729 is the determined cDNA sequence for clone 62227594 R0390:F12

[1777] SEQ ID NO:1730 is the determined cDNA sequence for clone 62227596 R0390:G02

[1778] SEQ ID NO:1731 is the determined cDNA sequence for clone 62227598 R0390:G04

[1779] SEQ ID NO:1732 is the determined cDNA sequence for clone 62227599 R0390:G05

[1780] SEQ ID NO:1733 is the determined cDNA sequence for clone 62227600 R0390:G06

[1781] SEQ ID NO:1734 is the determined cDNA sequence for clone 62227601 R0390:G07

[1782] SEQ ID NO:1735 is the determined cDNA sequence for clone 62227602 R0390:G08

[1783] SEQ ID NO:1736 is the determined cDNA sequence for clone 62227603 R0390:G09

[1784] SEQ ID NO:1737 is the determined cDNA sequence for clone 62227605 R0390:G11

[1785] SEQ ID NO:1738 is the determined cDNA sequence for clone 62227607 R0390:H01

[1786] SEQ ID NO:1739 is the determined cDNA sequence for clone 62227608 R0390:H02

[1787] SEQ ID NO:1740 is the determined cDNA sequence for clone 62227609 R0390:H03

[1788] SEQ ID NO:1741 is the determined cDNA sequence for clone 62227610 R0390:H04

[1789] SEQ ID NO:1742 is the determined cDNA sequence for clone 62227611 R0390:H05

[1790] SEQ ID NO:1743 is the determined cDNA sequence for clone 62227613 R0390:H07

[1791] SEQ ID NO:1744 is the determined cDNA sequence for clone 62227614 R0390:H08

[1792] SEQ ID NO:1745 is the determined cDNA sequence for clone 62227616 R0390:H10

[1793] SEQ ID NO:1746 is the determined cDNA sequence for clone 62227617 R0390:H11

[1794] SEQ ID NO:1747 is the determined cDNA sequence for clone 62227339 R0391:A02

[1795] SEQ ID NO:1748 is the determined cDNA sequence for clone 62227340 R0391:A03

[1796] SEQ ID NO:1749 is the determined cDNA sequence for clone 62227341 R0391:A05

[1797] SEQ ID NO:1750 is the determined cDNA sequence for clone 62227342 R0391:A06

[1798] SEQ ID NO:1751 is the determined cDNA sequence for clone 62227343 R0391:A07

[1799] SEQ ID NO:1752 is the determined .DNA sequence for clone 62227344 R0391:A08

[1800] SEQ ID NO:1753 is the determined cDNA sequence for clone 62227345 R0391:A09

[1801] SEQ ID NO:1754 is the determined cDNA sequence for clone 62227346 R0391:A10

[1802] SEQ ID NO:1755 is the determined cDNA sequence for clone 62227348 R0391:A12

[1803] SEQ ID NO:1756 is the determined cDNA sequence for clone 62227349 R0391:B01

[1804] SEQ ID NO:1757 is the determined cDNA sequence for clone 62227352 R0391:B04

[1805] SEQ ID NO:1758 is the determined cDNA sequence for clone 62227353 R0391:B05

[1806] SEQ ID NO:1759 is the determined cDNA sequence for clone 62227355 R0391:B07

[1807] SEQ ID NO:1760 is the determined cDNA sequence for clone 62227356 R0391:B08

[1808] SEQ ID NO:1761 is the determined cDNA sequence for clone 62227359 R0391:B11

[1809] SEQ ID NO:1762 is the determined cDNA sequence for clone 62227360 R0391:B12

[1810] SEQ ID NO:1763 is the determined cDNA sequence for clone 62227361 R0391:C01

[1811] SEQ ID NO:1764 is the determined cDNA sequence for clone 62227362 R0391:C02

[1812] SEQ ID NO:1765 is the determined cDNA sequence for clone 62227363 R0391:C03

[1813] SEQ ID NO:1766 is the determined cDNA sequence for clone 62227364 R0391:C04

[1814] SEQ ID NO:1767 is the determined cDNA sequence for clone 62227365 R0391:C05

[1815] SEQ ID NO:1768 is the determined cDNA sequence for clone 62227366 R0391:C06

[1816] SEQ ID NO:1769 is the determined cDNA sequence for clone 62227367 R0391:C07

[1817] SEQ ID NO:1770 is the determined cDNA sequence for clone 62227368 R0391:C08

[1818] SEQ ID NO:1771 is the determined cDNA sequence for clone 62227369 R0391:C09

[1819] SEQ ID NO:1772 is the determined cDNA sequence for clone 62227370 R0391:C10

[1820] SEQ ID NO:1773 is the determined cDNA sequence for clone 62227371 R0391:C11

[1821] SEQ ID NO:1774 is the determined cDNA sequence for clone 62227372 R0391:C12

[1822] SEQ ID NO:1775 is the determined cDNA sequence for clone 62227373 R0391:D01

[1823] SEQ ID NO:1776 is the determined cDNA sequence for clone 62227375 R0391:D03

[1824] SEQ ID NO:1777 is the determined cDNA sequence for clone 62227376 R0391:D04

[1825] SEQ ID NO:1778 is the determined cDNA sequence for clone 62227377 R0391:D05

[1826] SEQ ID NO:1779 is the determined cDNA sequence for clone 62227380 R0391:D08

[1827] SEQ ID NO:1780 is the determined cDNA sequence for clone 62227381 R0391:D09

[1828] SEQ ID NO:1781 is the determined cDNA sequence for clone 62227382 R0391:D10

[1829] SEQ ID NO:1782 is the determined cDNA sequence for clone 62227383 R0391:D11

[1830] SEQ ID NO:1783 is the determined cDNA sequence for clone 62227384 R0391:D12

[1831] SEQ ID NO:1784 is the determined cDNA sequence for clone 62227385 R0391:E01

[1832] SEQ ID NO:1785 is the determined cDNA sequence for clone 62227386 R0391:E02

[1833] SEQ ID NO:1786 is the determined cDNA sequence for clone 62227387 R0391:E03

[1834] SEQ ID NO:1787 is the determined cDNA sequence for clone 62227388 R0391:E04

[1835] SEQ ID NO:1788 is the determined cDNA sequence for clone 62227389 R0391:E05

[1836] SEQ ID NO:1789 is the determined cDNA sequence for clone 62227390 R0391:E06

[1837] SEQ ID NO:1790 is the determined cDNA sequence for clone 62227391 R0391:E07

[1838] SEQ ID NO:1791 is the determined cDNA sequence for clone 62227392 R0391:E08

[1839] SEQ ID NO:1792 is the determined cDNA sequence for clone 62227393 R0391:E09

[1840] SEQ ID NO:1793 is the determined cDNA sequence for clone 62227395 R0391:E11

[1841] SEQ ID NO:1794 is the determined cDNA sequence for clone 62227396 R0391:E12

[1842] SEQ ID NO:1795 is the determined cDNA sequence for clone 62227397 R0391:F01

[1843] SEQ ID NO:1796 is the determined cDNA sequence for clone 62227399 R0391:F03

[1844] SEQ ID NO:1797 is the determined cDNA sequence for clone 62227400 R0391:F04

[1845] SEQ ID NO:1798 is the determined cDNA sequence for clone 62227402 R0391:F06

[1846] SEQ ID NO:1799 is the determined cDNA sequence for clone 62227403 R0391:F07

[1847] SEQ ID NO:1800 is the determined cDNA sequence for clone 62227405 R0391:F09

[1848] SEQ ID NO:1801 is the determined cDNA sequence for clone 62227406 R0391:F10

[1849] SEQ ID NO:1802 is the determined cDNA sequence for clone 62227408 R0391:F12

[1850] SEQ ID NO:1803 is the determined cDNA sequence for clone 62227409 R0391:G01

[1851] SEQ ID NO:1804 is the determined cDNA sequence for clone 62227412 R0391:G04

[1852] SEQ ID NO:1805 is the determined cDNA sequence for clone 62227415 R0391:G07

[1853] SEQ ID NO:1806 is the determined cDNA sequence for clone 62227417 R0391:G09

[1854] SEQ ID NO:1807 is the determined cDNA sequence for clone 62227418 R0391:G10

[1855] SEQ ID NO:1808 is the determined cDNA sequence for clone 62227419 R0391:G11

[1856] SEQ ID NO:1809 is the determined cDNA sequence for clone 62227420 R0391:G12

[1857] SEQ ID NO:1810 is the determined cDNA sequence for clone 62227421 R0391:H01

[1858] SEQ ID NO:1811 is the determined cDNA sequence for clone 62227423 R0391:H03

[1859] SEQ ID NO:1812 is the determined cDNA sequence for clone 62227429 R0391:H09

[1860] SEQ ID NO:1813 is the determined cDNA sequence for clone 62227430 R0391:H10

[1861] SEQ ID NO:1814 is the determined cDNA sequence for clone 62227431 R0391:H11

[1862] SEQ ID NO:1815 is the determined cDNA sequence for clone 62342810 R0392:A02

[1863] SEQ ID NO:1816 is the determined cDNA sequence for clone 62342811 R0392:A03

[1864] SEQ ID NO:1817 is the determined cDNA sequence for clone 62342812 R0392:A05

[1865] SEQ ID NO:1818 is the determined cDNA sequence for clone 62342813 R0392:A06

[1866] SEQ ID NO:1819 is the determined cDNA sequence for clone 62342814 R0392:A07

[1867] SEQ ID NO:1820 is the determined cDNA sequence for clone 62342815 R0392:A08

[1868] SEQ ID NO:1821 is the determined cDNA sequence for clone 62342816 R0392:A09

[1869] SEQ ID NO:1822 is the determined cDNA sequence for clone 62342817 R0392:A10

[1870] SEQ ID NO:1823 is the determined cDNA sequence for clone 62342818 R0392:A11

[1871] SEQ ID NO:1824 is the determined cDNA sequence for clone 62342819 R0392:A12

[1872] SEQ ID NO:1825 is the determined cDNA sequence for clone 62342821 R0392:B02

[1873] SEQ ID NO:1826 is the determined cDNA sequence for clone 62342822 R0392:B03

[1874] SEQ ID NO:1827 is the determined cDNA sequence for clone 62342823 R0392:B04

[1875] SEQ ID NO:1828 is the determined cDNA sequence for clone 62342824 R0392:B05

[1876] SEQ ID NO:1829 is the determined cDNA sequence for clone 62342825 R0392:B06

[1877] SEQ ID NO:1830 is the determined cDNA sequence for clone 62342826 R0392:B07

[1878] SEQ ID NO:1831 is the determined cDNA sequence for clone 62342827 R0392:B08

[1879] SEQ ID NO:1832 is the determined :DNA sequence for clone 62342828 R0392:B09

[1880] SEQ ID NO:1833 is the determined cDNA sequence for clone 62342829 R0392:B10

[1881] SEQ ID NO:1834 is the determined cDNA sequence for clone 62342830 R0392:B11

[1882] SEQ ID NO:1835 is the determined cDNA sequence for clone 62342831 R0392:B12

[1883] SEQ ID NO:1836 is the determined cDNA sequence for clone 62342832 R0392:C01

[1884] SEQ ID NO:1837 is the determined cDNA sequence for clone 62342833 R0392:C02

[1885] SEQ ID NO:1838 is the determined cDNA sequence for clone 62342834 R0392:C03

[1886] SEQ ID NO:1839 is the determined cDNA sequence for clone 62342835 R0392:C04

[1887] SEQ ID NO:1840 is the determined cDNA sequence for clone 62342836 R0392:C05

[1888] SEQ ID NO:1841 is the determined cDNA sequence for clone 62342837 R0392:C06

[1889] SEQ ID NO:1842 is the determined cDNA sequence for clone 62342838 R0392:C07

[1890] SEQ ID NO:1843 is the determined cDNA sequence for clone 62342839 R0392:C08

[1891] SEQ ID NO:1844 is the determined cDNA sequence for clone 62342840 R0392:C09

[1892] SEQ ID NO:1845 is the determined cDNA sequence for clone 62342841 R0392:C10

[1893] SEQ ID NO:1846 is the determined cDNA sequence for clone 62342842 R0392:C11

[1894] SEQ ID NO:1847 is the determined cDNA sequence for clone 62342843 R0392:C12

[1895] SEQ ID NO:1848 is the determined cDNA sequence for clone 62342844 R0392:D01

[1896] SEQ ID NO:1849 is the determined cDNA sequence for clone 62342846 R0392:D03

[1897] SEQ ID NO:1850 is the determined cDNA sequence for clone 62342847 R0392:D04

[1898] SEQ ID NO:1851 is the determined cDNA sequence for clone 62342848 R0392:D05

[1899] SEQ ID NO:1852 is the determined cDNA sequence for clone 62342849 R0392:D06

[1900] SEQ ID NO:1853 is the determined cDNA sequence for clone 62342850 R0392:D07

[1901] SEQ ID NO:1854 is the determined cDNA sequence for clone 62342851 R0392:D08

[1902] SEQ ID NO:1855 is the determined cDNA sequence for clone 62342852 R0392:D09

[1903] SEQ ID NO:1856 is the determined cDNA sequence for clone 62342854 R0392:D11

[1904] SEQ ID NO:1857 is the determined cDNA sequence for clone 62342857 R0392:E02

[1905] SEQ ID NO:1858 is the determined cDNA sequence for clone 62342858 R0392:E03

[1906] SEQ ID NO:1859 is the determined cDNA sequence for clone 62342859 R0392:E04

[1907] SEQ ID NO:1860 is the determined cDNA sequence for clone 62342860 R0392:E05

[1908] SEQ ID NO:1861 is the determined cDNA sequence for clone 62342861 R0392:E06

[1909] SEQ ID NO:1862 is the determined cDNA sequence for clone 62342862 R0392:E07

[1910] SEQ ID NO:1863 is the determined cDNA sequence for clone 62342863 R0392:E08

[1911] SEQ ID NO:1864 is the determined cDNA sequence for clone 62342864 R0392:E09

[1912] SEQ ID NO:1865 is the determined cDNA sequence for clone 62342865 R0392:E10

[1913] SEQ ID NO:1866 is the determined cDNA sequence for clone 62342866 R0392:E11

[1914] SEQ ID NO:1867 is the determined cDNA sequence for clone 62342872 R0392:F05

[1915] SEQ ID NO:1868 is the determined cDNA sequence for clone 62342873 R0392:F06

[1916] SEQ ID NO:1869 is the determined cDNA sequence for clone 62342874 R0392:F07

[1917] SEQ ID NO:1870 is the determined cDNA sequence for clone 62342875 R0392:F08

[1918] SEQ ID NO:1871 is the determined cDNA sequence for clone 62342879 R0392:F12

[1919] SEQ ID NO:1872 is the determined cDNA sequence for clone 62342880 R0392:G01

[1920] SEQ ID NO:1873 is the determined cDNA sequence for clone 62342881 R0392:G02

[1921] SEQ ID NO:1874 is the determined cDNA sequence for clone 62342882 R0392:G03

[1922] SEQ ID NO:1875 is the determined cDNA sequence for clone 62342883 R0392:G04

[1923] SEQ ID NO:1876 is the determined cDNA sequence for clone 62342885 R0392:G06

[1924] SEQ ID NO:1877 is the determined cDNA sequence for clone 62342886 R0392:G07

[1925] SEQ ID NO:1878 is the determined cDNA sequence for clone 62342887 R0392:G08

[1926] SEQ ID NO:1879 is the determined cDNA sequence for clone 62342888 R0392:G09

[1927] SEQ ID NO:1880 is the determined cDNA sequence for clone 62342889 R0392:G10

[1928] SEQ ID NO:1881 is the determined cDNA sequence for clone 62342890 R0392:G11

[1929] SEQ ID NO:1882 is the determined cDNA sequence for clone 62342891 R0392:G12

[1930] SEQ ID NO:1883 is the determined cDNA sequence for clone 62342892 R0392:H01

[1931] SEQ ID NO:1884 is the determined cDNA sequence for clone 62342893 R0392:H02

[1932] SEQ ID NO:1885 is the determined cDNA sequence for clone 62342894 R0392:H03

[1933] SEQ ID NO:1886 is the determined cDNA sequence for clone 62342895 R0392:H04

[1934] SEQ ID NO:1887 is the determined cDNA sequence for clone 62342896 R0392:H05

[1935] SEQ ID NO:1888 is the determined cDNA sequence for clone 62342897 R0392:H06

[1936] SEQ ID NO:1889 is the determined cDNA sequence for clone 62342898 R0392:H07

[1937] SEQ ID NO:1890 is the determined cDNA sequence for clone 62342899 R0392:H08

[1938] SEQ ID NO:1891 is the determined cDNA sequence for clone 62342900 R0392:H09

[1939] SEQ ID NO:1892 is the determined cDNA sequence for clone 62342901 R0392:H10

[1940] SEQ ID NO:1893 is the determined cDNA sequence for clone 62177424 R0393:A02

[1941] SEQ ID NO:1894 is the determined cDNA sequence for clone 62177425 R0393:A03

[1942] SEQ ID NO:1895 is the determined cDNA sequence for clone 62177426 R0393:A05

[1943] SEQ ID NO:1896 is the determined cDNA sequence for clone 62177427 R0393:A06

[1944] SEQ ID NO:1897 is the determined cDNA sequence for clone 62177428 R0393:A07

[1945] SEQ ID NO:1898 is the determined cDNA sequence for clone 62177429 R0393:A08

[1946] SEQ ID NO:1899 is the determined cDNA sequence for clone 62177430 R0393:A09

[1947] SEQ ID NO:1900 is the determined cDNA sequence for clone 62177431 R0393 :A10

[1948] SEQ ID NO:1901 is the determined cDNA sequence for clone 62177432 R0393:A11

[1949] SEQ ID NO:1902 is the determined cDNA sequence for clone 62177433 R0393:A12

[1950] SEQ ID NO:1903 is the determined cDNA sequence for clone 62177435 R0393:B02

[1951] SEQ ID NO:1904 is the determined cDNA sequence for clone 62177436 R0393:B03

[1952] SEQ ID NO:1905 is the determined cDNA sequence for clone 62177438 R0393:B05

[1953] SEQ ID NO:1906 is the determined cDNA sequence for clone 62177439 R0393:B06

[1954] SEQ ID NO:1907 is the determined cDNA sequence for clone 62177441 R0393:B08

[1955] SEQ ID NO:1908 is the determined cDNA sequence for clone 62177442 R0393:B09

[1956] SEQ ID NO:1909 is the determined cDNA sequence for clone 62177443 R0393:B10

[1957] SEQ ID NO:1910 is the determined cDNA sequence for clone 62177444 R0393:B11

[1958] SEQ ID NO:1911 is the determined cDNA sequence for clone 62177445 R0393:B12

[1959] SEQ ID NO:1912 is the determined cDNA sequence for clone 62177446 R0393:C01

[1960] SEQ ID NO:1913 is the determined cDNA sequence for clone 62177447 R0393:C02

[1961] SEQ ID NO:1914 is the determined cDNA sequence for clone 62177448 R0393:C03

[1962] SEQ ID NO:1915 is the determined cDNA sequence for clone 62177449 R0393:C04

[1963] SEQ ID NO:1916 is the determined cDNA sequence for clone 62177450 R0393:C05

[1964] SEQ ID NO:1917 is the determined cDNA sequence for clone 62177451 R0393:C06

[1965] SEQ ID NO:1918 is the determined cDNA sequence for clone 62177452 R0393:C07

[1966] SEQ ID NO:1919 is the determined cDNA sequence for clone 62177453 R0393:C08

[1967] SEQ ID NO:1920 is the determined cDNA sequence for clone 62177454 R0393 :C09

[1968] SEQ ID NO:1921 is the determined cDNA sequence for clone 62177455 R0393:C10

[1969] SEQ ID NO:1922 is the determined cDNA sequence for clone 62177457 R0393:C12

[1970] SEQ ID NO:1923 is the determined cDNA sequence for clone 62177458 R0393:D01

[1971] SEQ ID NO:1924 is the determined cDNA sequence for clone 62177459 R0393:D02

[1972] SEQ ID NO:1925 is the determined cDNA sequence for clone 62177460 R0393:D03

[1973] SEQ ID NO:1926 is the determined cDNA sequence for clone 62177461 R0393:D04

[1974] SEQ ID NO:1927 is the determined cDNA sequence for clone 62177462 R0393:D05

[1975] SEQ ID NO:1928 is the determined cDNA sequence for clone 62177463 R0393:D06

[1976] SEQ ID NO:1929 is the determined cDNA sequence for clone 62177464 R0393:D07

[1977] SEQ ID NO:1930 is the determined cDNA sequence for clone 62177465 R0393:D08

[1978] SEQ ID NO:1931 is the determined cDNA sequence for clone 62177466 R0393:D09

[1979] SEQ ID NO:1932 is the determined cDNA sequence for clone 62177467 R0393:D10

[1980] SEQ ID NO:1933 is the determined cDNA sequence for clone 62177469 R0393:D 12

[1981] SEQ ID NO:1934 is the determined cDNA sequence for clone 62177470 R0393:E01

[1982] SEQ ID NO:1935 is the determined cDNA sequence for clone 62177471 R0393:E02

[1983] SEQ ID NO:1936 is the determined cDNA sequence for clone 62177472 R0393:E03

[1984] SEQ ID NO:1937 is the determined cDNA sequence for clone 62177473 R0393:E04

[1985] SEQ ID NO:1938 is the determined cDNA sequence for clone 62177474 R0393:E05

[1986] SEQ ID NO:1939 is the determined cDNA sequence for clone 62177475 R0393:E06

[1987] SEQ ID NO:1940 is the determined cDNA sequence for clone 62177476 R0393:E07

[1988] SEQ ID NO:1941 is the determined cDNA sequence for clone 62177477 R0393:E08

[1989] SEQ ID NO:1942 is the determined cDNA sequence for clone 62177478 R0393:E09

[1990] SEQ ID NO:1943 is the determined cDNA sequence for clone 62177480 R0393:E11

[1991] SEQ ID NO:1944 is the determined cDNA sequence for clone 62177481 R0393:E12

[1992] SEQ ID NO:1945 is the determined cDNA sequence for clone 62177482 R0393:F01

[1993] SEQ ID NO:1946 is the determined cDNA sequence for clone 62177483 R0393:F02

[1994] SEQ ID NO:1947 is the determined cDNA sequence for clone 62177484 R0393:F03

[1995] SEQ ID NO:1948 is the determined cDNA sequence for clone 62177485 R0393:F04

[1996] SEQ ID NO:1949 is the determined cDNA sequence for clone 62177486 R0393:F05

[1997] SEQ ID NO:1950 is the determined cDNA sequence for clone 62177487 R0393:F06

[1998] SEQ ID NO:1951 is the determined cDNA sequence for clone 62177488 R0393:F07

[1999] SEQ ID NO:1952 is the determined cDNA sequence for clone 62177489 R0393:F08

[2000] SEQ ID NO:1953 is the determined cDNA sequence for clone 62177490 R0393:F09

[2001] SEQ ID NO:1954 is the determined cDNA sequence for clone 62177491 R0393:F10

[2002] SEQ ID NO:1955 is the determined cDNA sequence for clone 62177492 R0393:F11

[2003] SEQ ID NO:1956 is the determined cDNA sequence for clone 62177493 R0393:F12

[2004] SEQ ID NO:1957 is the determined cDNA sequence for clone 62177494 R0393:G01

[2005] SEQ ID NO:1958 is the determined cDNA sequence for clone 62177495 R0393:G02

[2006] SEQ ID NO:1959 is the determined cDNA sequence for clone 62177496 R0393:G03

[2007] SEQ ID NO:1960 is the determined cDNA sequence for clone 62177497 R0393:G04

[2008] SEQ ID NO:1961 is the determined cDNA sequence for clone 62177498 R0393:G05

[2009] SEQ ID NO:1962 is the determined cDNA sequence for clone 62177499 R0393:G06

[2010] SEQ ID NO:1963 is the determined cDNA sequence for clone 62177500 R0393:G07

[2011] SEQ ID NO:1964 is the determined cDNA sequence for clone 62177501 R0393:G08

[2012] SEQ ID NO:1965 is the determined cDNA sequence for clone 62177502 R0393:G09

[2013] SEQ ID NO:1966 is the determined cDNA sequence for clone 62177503 R0393:G10

[2014] SEQ ID NO:1967 is the determined cDNA sequence for clone 62177504 R0393:G11

[2015] SEQ ID NO:1968 is the determined cDNA sequence for clone 62177505 R0393:G12

[2016] SEQ ID NO:1969 is the determined cDNA sequence for clone 62177506 R0393:H01

[2017] SEQ ID NO:1970 is the determined cDNA sequence for clone 62177507 R0393:H02

[2018] SEQ ID NO:1971 is the determined cDNA sequence for clone 62177509 R0393:H04

[2019] SEQ ID NO:1972 is the determined cDNA sequence for clone 62177510 R0393:H05

[2020] SEQ ID NO:1973 is the determined cDNA sequence for clone 62177511 R0393:H06

[2021] SEQ ID NO:1974 is the determined cDNA sequence for clone 62177513 R0393:H08

[2022] SEQ ID NO:1975 is the determined cDNA sequence for clone 62177514 R0393:H09

[2023] SEQ ID NO:1976 is the determined cDNA sequence for clone 62177515 R0393:H10

[2024] SEQ ID NO:1977 is the determined cDNA sequence for clone 62177516 R0393:H11

[2025] SEQ ID NO:1978 is the determined cDNA sequence for clone 62227153 R0394:A02

[2026] SEQ ID NO:1979 is the determined cDNA sequence for clone 62227154 R0394:A03

[2027] SEQ ID NO:1980 is the determined cDNA sequence for clone 62227155 R0394:A05

[2028] SEQ ID NO:1981 is the determined cDNA sequence for clone 62227156 R0394:A06

[2029] SEQ ID NO:1982 is the determined cDNA sequence for clone 62227157 R0394:A07

[2030] SEQ ID NO:1983 is the determined cDNA sequence for clone 62227158 R0394:A08

[2031] SEQ ID NO:1984 is the determined cDNA sequence for clone 62227159 R0394:A09

[2032] SEQ ID NO:1985 is the determined cDNA sequence for clone 62227160 R0394:A10

[2033] SEQ ID NO:1986 is the determined cDNA sequence for clone 62227161 R0394:A11

[2034] SEQ ID NO:1987 is the determined cDNA sequence for clone 62227162 R0394:A12

[2035] SEQ ID NO:1988 is the determined cDNA sequence for clone 62227164 R0394:B02

[2036] SEQ ID NO:1989 is the determined cDNA sequence for clone 62227165 R0394:B03

[2037] SEQ ID NO:1990 is the determined cDNA sequence for clone 62227166 R0394:B04

[2038] SEQ ID NO:1991 is the determined cDNA sequence for clone 62227167 R0394:B05

[2039] SEQ ID NO:1992 is the determined cDNA sequence for clone 62227169 R0394:B07

[2040] SEQ ID NO:1993 is the determined cDNA sequence for clone 62227170 R0394:B08

[2041] SEQ ID NO:1994 is the determined cDNA sequence for clone 62227171 R0394:B09

[2042] SEQ ID NO:1995 is the determined cDNA sequence for clone 62227172 R0394:B10

[2043] SEQ ID NO:1996 is the determined cDNA sequence for clone 62227173 R0394:B11

[2044] SEQ ID NO:1997 is the determined cDNA sequence for clone 62227174 R0394:B12

[2045] SEQ ID NO:1998 is the determined cDNA sequence for clone 62227175 R0394:C01

[2046] SEQ ID NO:1999 is the determined cDNA sequence for clone 62227177 R0394:C03

[2047] SEQ ID NO:2000 is the determined cDNA sequence for clone 62227178 R0394:C04

[2048] SEQ ID NO:2001 is the determined cDNA sequence for clone 62227179 R0394:C05

[2049] SEQ ID NO:2002 is the determined cDNA sequence for clone 62227180 R0394:C06

[2050] SEQ ID NO:2003 is the determined cDNA sequence for clone 62227181 R0394:C07

[2051] SEQ ID NO:2004 is the determined cDNA sequence for clone 62227182 R0394:C08

[2052] SEQ ID NO:2005 is the determined cDNA sequence for clone 62227183 R0394:C09

[2053] SEQ ID NO:2006 is the determined cDNA sequence for clone 62227185 R0394:C11

[2054] SEQ ID NO:2007 is the determined cDNA sequence for clone 62227187 R0394:D01

[2055] SEQ ID NO:2008 is the determined cDNA sequence for clone 62227188 R0394:D02

[2056] SEQ ID NO:2009 is the determined cDNA sequence for clone 62227189 R0394:D03

[2057] SEQ ID NO:2010 is the determined cDNA sequence for clone 62227190 R0394:D04

[2058] SEQ ID NO:2011 is the determined cDNA sequence for clone 62227191 R0394:D05

[2059] SEQ ID NO:2012 is the determined cDNA sequence for clone 62227193 R0394:D07

[2060] SEQ ID NO:2013 is the determined cDNA sequence for clone 62227194 R0394:D08

[2061] SEQ ID NO:2014 is the determined cDNA sequence for clone 62227195 R0394:D09

[2062] SEQ ID NO:2015 is the determined cDNA sequence for clone 62227197 R0394:D11

[2063] SEQ ID NO:2016 is the determined cDNA sequence for clone 62227198 R0394:D12

[2064] SEQ ID NO:2017 is the determined cDNA sequence for clone 62227199 R0394:E01

[2065] SEQ ID NO:2018 is the determined cDNA sequence for clone 62227200 R0394:E02

[2066] SEQ ID NO:2019 is the determined cDNA sequence for clone 62227201 R0394:E03

[2067] SEQ ID NO:2020 is the determined cDNA sequence for clone 62227202 R0394:E04

[2068] SEQ ID NO:2021 is the determined cDNA sequence for clone 62227203 R0394:E05

[2069] SEQ ID NO:2022 is the determined cDNA sequence for clone 62227204 R0394:E06

[2070] SEQ ID NO:2023 is the determined cDNA sequence for clone 62227205 R0394:E07

[2071] SEQ ID NO:2024 is the determined cDNA sequence for clone 62227206 R0394:E08

[2072] SEQ ID NO:2025 is the determined cDNA sequence for clone 62227207 R0394:E09

[2073] SEQ ID NO:2026 is the determined cDNA sequence for clone 62227208 R0394:E10

[2074] SEQ ID NO:2027 is the determined cDNA sequence for clone 62227209 R0394:E11

[2075] SEQ ID NO:2028 is the determined cDNA sequence for clone 62227210 R0394:E12

[2076] SEQ ID NO:2029 is the determined cDNA sequence for clone 62227212 R0394:F02

[2077] SEQ ID NO:2030 is the determined cDNA sequence for clone 62227213 R0394:F03

[2078] SEQ ID NO:2031 is the determined cDNA sequence for clone 62227214 R0394:F04

[2079] SEQ ID NO:2032 is the determined cDNA sequence for clone 62227216 R0394:F06

[2080] SEQ ID NO:2033 is the determined cDNA sequence for clone 62227217 R0394:F07

[2081] SEQ ID NO:2034 is the determined cDNA sequence for clone 62227218 R0394:F08

[2082] SEQ ID NO:2035 is the determined cDNA sequence for clone 62227219 R0394:F09

[2083] SEQ ID NO:2036 is the determined cDNA sequence for clone 62227220 R0394:F10

[2084] SEQ ID NO:2037 is the determined cDNA sequence for clone 62227221 R0394:F11

[2085] SEQ ID NO:2038 is the determined cDNA sequence for clone 62227222 R0394:F02

[2086] SEQ ID NO:2039 is the determined cDNA sequence for clone 62227223 R0394:G01

[2087] SEQ ID NO:2040 is the determined cDNA sequence for clone 62227224 R0394:G02

[2088] SEQ ID NO:2041 is the determined cDNA sequence for clone 62227226 R0394:G04

[2089] SEQ ID NO:2042 is the determined cDNA sequence for clone 62227229 R0394:G07

[2090] SEQ ID NO:2043 is the determined cDNA sequence for clone 62227230 R0394:G08

[2091] SEQ ID NO:2044 is the determined cDNA sequence for clone 62227231 R0394:G09

[2092] SEQ ID NO:2045 is the determined cDNA sequence for clone 62227232 R0394:G10

[2093] SEQ ID NO:2046 is the determined cDNA sequence for clone 62227233 R0394:G11

[2094] SEQ ID NO:2047 is the determined cDNA sequence for clone 62227234 R0394:G12

[2095] SEQ ID NO:2048 is the determined cDNA sequence for clone 62227236 R0394:H02

[2096] SEQ ID NO:2049 is the determined cDNA sequence for clone 62227237 R0394:H03

[2097] SEQ ID NO:2050 is the determined cDNA sequence for clone 62227238 R0394:H04

[2098] SEQ ID NO:2051 is the determined cDNA sequence for clone 62227239 R0394:H05

[2099] SEQ ID NO:2052 is the determined cDNA sequence for clone 62227241 R0394:H07

[2100] SEQ ID NO:2053 is the determined cDNA sequence for clone 62227242 R0394:H08

[2101] SEQ ID NO:2054 is the determined cDNA sequence for clone 62227243 R0394:H09

[2102] SEQ ID NO:2055 is the determined cDNA sequence for clone 62227244 R0394:H10

[2103] SEQ ID NO:2056 is the determined cDNA sequence for clone 62227245 R0394:H11

[2104] SEQ ID NO:2057 is the determined cDNA sequence for clone 62296724 R0395:A03

[2105] SEQ ID NO:2058 is the determined cDNA sequence for clone 62296725 R0395:A05

[2106] SEQ ID NO:2059 is the determined cDNA sequence for clone 62296726 R0395:A06

[2107] SEQ ID NO:2060 is the determined cDNA sequence for clone 62296727 R0395:A07

[2108] SEQ ID NO:2061 is the determined cDNA sequence for clone 62296729 R0395:A09

[2109] SEQ ID NO:2062 is the determined cDNA sequence for clone 62296730 R0395:A10

[2110] SEQ ID NO:2063 is the determined cDNA sequence for clone 62296731 R0395:A11

[2111] SEQ ID NO:2064 is the determined cDNA sequence for clone 62296733 R0395:B01

[2112] SEQ ID NO:2065 is the determined cDNA sequence for clone 62296734 R0395:B02

[2113] SEQ ID NO:2066 is the determined cDNA sequence for clone 62296735 R0395:B03

[2114] SEQ ID NO:2067 is the determined cDNA sequence for clone 62296736 R0395:B04

[2115] SEQ ID NO:2068 is the determined cDNA sequence for clone 62296737 R0395:B05

[2116] SEQ ID NO:2069 is the determined cDNA sequence for clone 62296738 R0395:B06

[2117] SEQ ID NO:2070 is the determined cDNA sequence for clone 62296739 R0395:B07

[2118] SEQ ID NO:2071 is the determined cDNA sequence for clone 62296740 R0395:B08

[2119] SEQ ID NO:2072 is the determined cDNA sequence for clone 62296741 R0395:B09

[2120] SEQ ID NO:2073 is the determined cDNA sequence for clone 62296742 R0395:B10

[2121] SEQ ID NO:2074 is the determined cDNA sequence for clone 62296743 R0395:B11

[2122] SEQ ID NO:2075 is the determined cDNA sequence for clone 62296744 R0395:B12

[2123] SEQ ID NO:2076 is the determined cDNA sequence for clone 62296746 R0395:C02

[2124] SEQ ID NO:2077 is the determined cDNA sequence for clone 62296747 R0395:C03

[2125] SEQ ID NO:2078 is the determined cDNA sequence for clone 62296748 R0395:C04

[2126] SEQ ID NO:2079 is the determined cDNA sequence for clone 62296750 R0395:C06

[2127] SEQ ID NO:2080 is the determined cDNA sequence for clone 62296751 R0395:C07

[2128] SEQ ID NO:2081 is the determined cDNA sequence for clone 62296752 R0395:C08

[2129] SEQ ID NO:2082 is the determined cDNA sequence for clone 62296753 R0395:C09

[2130] SEQ ID NO:2083 is the determined cDNA sequence for clone 62296754 R0395:C10

[2131] SEQ ID NO:2084 is the determined cDNA sequence for clone 62296755 R0395:C11

[2132] SEQ ID NO:2085 is the determined cDNA sequence for clone 62296756 R0395:C12

[2133] SEQ ID NO:2086 is the determined cDNA sequence for clone 62296757 R0395:D01

[2134] SEQ ID NO:2087 is the determined cDNA sequence for clone 62296758 R0395:D02

[2135] SEQ ID NO:2088 is the determined cDNA sequence for clone 62296759 R0395:D03

[2136] SEQ ID NO:2089 is the determined cDNA sequence for clone 62296760 R0395:D04

[2137] SEQ ID NO:2090 is the determined cDNA sequence for clone 62296761 R0395:D05

[2138] SEQ ID NO:2091 is the determined cDNA sequence for clone 62296762 R0395:D06

[2139] SEQ ID NO:2092 is the determined cDNA sequence for clone 62296763 R0395:D07

[2140] SEQ ID NO:2093 is the determined cDNA sequence for clone 62296764 R0395:D08

[2141] SEQ ID NO:2094 is the determined cDNA sequence for clone 62296765 R0395:D09

[2142] SEQ ID NO:2095 is the determined cDNA sequence for clone 62296766 R0395:D10

[2143] SEQ ID NO:2096 is the determined cDNA sequence for clone 62296767 R0395:D11

[2144] SEQ ID NO:2097 is the determined cDNA sequence for clone 62296768 R0395:D12

[2145] SEQ ID NO:2098 is the determined cDNA sequence for clone 62296769 R0395:E01

[2146] SEQ ID NO:2099 is the determined cDNA sequence for clone 62296770 R0395:E02

[2147] SEQ ID NO:2100 is the determined cDNA sequence for clone 62296771 R0395:E03

[2148] SEQ ID NO:2101 is the determined cDNA sequence for clone 62296772 R0395:E04

[2149] SEQ ID NO:2102 is the determined cDNA sequence for clone 62296773 R0395:E05

[2150] SEQ ID NO:2103 is the determined cDNA sequence for clone 62296774 R0395:E06

[2151] SEQ ID NO:2104 is the determined cDNA sequence for clone 62296775 R0395:E07

[2152] SEQ ID NO:2105 is the determined cDNA sequence for clone 62296776 R0395:E08

[2153] SEQ ID NO:2106 is the determined cDNA sequence for clone 62296777 R0395:E09

[2154] SEQ ID NO:2107 is the determined cDNA sequence for clone 62296778 R0395:E10

[2155] SEQ ID NO:2108 is the determined cDNA sequence for clone 62296779 R0395:E11

[2156] SEQ ID NO:2109 is the determined cDNA sequence for clone 62296780 R0395:E12

[2157] SEQ ID NO:2110 is the determined cDNA sequence for clone 62296781 R0395:F01

[2158] SEQ ID NO:2111 is the determined cDNA sequence for clone 62296783 R0395:F03

[2159] SEQ ID NO:2112 is the determined cDNA sequence for clone 62296785 R0395:F05

[2160] SEQ ID NO:2113 is the determined cDNA sequence for clone 62296786 R0395:F06

[2161] SEQ ID NO:2114 is the determined cDNA sequence for clone 62296787 R0395:F07

[2162] SEQ ID NO:2115 is the determined cDNA sequence for clone 62296788 R0395:F08

[2163] SEQ ID NO:2116 is the determined cDNA sequence for clone 62296789 R0395:F09

[2164] SEQ ID NO:2117 is the determined cDNA sequence for clone 62296790 R0395:F10

[2165] SEQ ID NO:2118 is the determined cDNA sequence for clone 62296791 R0395:F11

[2166] SEQ ID NO:2119 is the determined cDNA sequence for clone 62296792 R0395:F12

[2167] SEQ ID NO:2120 is the determined cDNA sequence for clone 62296795 R0395:G03

[2168] SEQ ID NO:2121 is the determined cDNA sequence for clone 62296796 R0395:G04

[2169] SEQ ID NO:2122 is the determined cDNA sequence for clone 62296798 R0395:G06

[2170] SEQ ID NO:2123 is the determined cDNA sequence for clone 62296799 R0395:G07

[2171] SEQ ID NO:2124 is the determined cDNA sequence for clone 62296801 R0395:G09

[2172] SEQ ID NO:2125 is the determined cDNA sequence for clone 62296802 R0395:G10

[2173] SEQ ID NO:2126 is the determined cDNA sequence for clone 62296803 R0395:G11

[2174] SEQ ID NO:2127 is the determined cDNA sequence for clone 62296804 R0395:G12

[2175] SEQ ID NO:2128 is the determined cDNA sequence for clone 62296805 R0395:H01

[2176] SEQ ID NO:2129 is the determined cDNA sequence for clone 62296807 R0395:H03

[2177] SEQ ID NO:2130 is the determined cDNA sequence for clone 62296808 R0395:H04

[2178] SEQ ID NO:2131 is the determined cDNA sequence for clone 62296810 R0395:H06

[2179] SEQ ID NO:2132 is the determined cDNA sequence for clone 62296811 R0395:H07

[2180] SEQ ID NO:2133 is the determined cDNA sequence for clone 62296812 R0395:H08

[2181] SEQ ID NO:2134 is the determined cDNA sequence for clone 62296814 R0395:H10

[2182] SEQ ID NO:2135 is the determined cDNA sequence for clone 62296815 R0395:H11

[2183] SEQ ID NO:2136 is the determined cDNA sequence for clone 62227061 R0396:A03

[2184] SEQ ID NO:2137 is the determined cDNA sequence for clone 62227062 R0396:A05

[2185] SEQ ID NO:2138 is the determined cDNA sequence for clone 62227063 R0396:A06

[2186] SEQ ID NO:2139 is the determined cDNA sequence for clone 62227064 R0396:A07

[2187] SEQ ID NO:2140 is the determined cDNA sequence for clone 62227065 R0396:A08

[2188] SEQ ID NO:2141 is the determined cDNA sequence for clone 62227066 R0396:A09

[2189] SEQ ID NO:2142 is the determined cDNA sequence for clone 62227067 R0396:A10

[2190] SEQ ID NO:2143 is the determined cDNA sequence for clone 62227068 R0396:A11

[2191] SEQ ID NO:2144 is the determined cDNA sequence for clone 62227069 R0396:A12

[2192] SEQ ID NO:2145 is the determined cDNA sequence for clone 62227070 R0396:B01

[2193] SEQ ID NO:2146 is the determined cDNA sequence for clone 62227071 R0396:B02

[2194] SEQ ID NO:2147 is the determined cDNA sequence for clone 62227072 R0396:B03

[2195] SEQ ID NO:2148 is the determined cDNA sequence for clone 62227074 R0396:B05

[2196] SEQ ID NO:2149 is the determined cDNA sequence for clone 62227076 R0396:B07

[2197] SEQ ID NO:2150 is the determined cDNA sequence for clone 62227078 R0396:B09

[2198] SEQ ID NO:2151 is the determined cDNA sequence for clone 62227079 R0396:B10

[2199] SEQ ID NO:2152 is the determined cDNA sequence for clone 62227080 R0396:B11

[2200] SEQ ID NO:2153 is the determined cDNA sequence for clone 62227081 R0396:B12

[2201] SEQ ID NO:2154 is the determined cDNA sequence for clone 62227082 R0396:C01

[2202] SEQ ID NO:2155 is the determined cDNA sequence for clone 62227083 R0396:C02

[2203] SEQ ID NO:2156 is the determined cDNA sequence for clone 62227085 R0396:C04

[2204] SEQ ID NO:2157 is the determined cDNA sequence for clone 62227086 R0396:C05

[2205] SEQ ID NO:2158 is the determined cDNA sequence for clone 62227087 R0396:C06

[2206] SEQ ID NO:2159 is the determined cDNA sequence for clone 62227088 R0396:C07

[2207] SEQ ID NO:2160 is the determined cDNA sequence for clone 62227091 R0396:C10

[2208] SEQ ID NO:2161 is the determined cDNA sequence for clone 62227092 R0396:C11

[2209] SEQ ID NO:2162 is the determined cDNA sequence for clone 62227093 R0396:C12

[2210] SEQ ID NO:2163 is the determined cDNA sequence for clone 62227094 R0396:D01

[2211] SEQ ID NO:2164 is the determined cDNA sequence for clone 62227095 R0396:D02

[2212] SEQ ID NO:2165 is the determined cDNA sequence for clone 62227096 R0396:D03

[2213] SEQ ID NO:2166 is the determined cDNA sequence for clone 62227097 R0396:D04

[2214] SEQ ID NO:2167 is the determined cDNA sequence for clone 62227098 R0396:D05

[2215] SEQ ID NO:2168 is the determined cDNA sequence for clone 62227099 R0396:D06

[2216] SEQ ID NO:2169 is the determined cDNA sequence for clone 62227100 R0396:D07

[2217] SEQ ID NO:2170 is the determined cDNA sequence for clone 62227101 R0396:D08

[2218] SEQ ID NO:2171 is the determined cDNA sequence for clone 62227102 R0396:D09

[2219] SEQ ID NO:2172 is the determined cDNA sequence for clone 62227103 R0396:D10

[2220] SEQ ID NO:2173 is the determined cDNA sequence for clone 62227104 R0396:D11

[2221] SEQ ID NO:2174 is the determined cDNA sequence for clone 62227105 R0396:D12

[2222] SEQ ID NO:2175 is the determined cDNA sequence for clone 62227107 R0396:E02

[2223] SEQ ID NO:2176 is the determined cDNA sequence for clone 62227109 R0396:E04

[2224] SEQ ID NO:2177 is the determined cDNA sequence for clone 62227110 R0396:E05

[2225] SEQ ID NO:2178 is the determined cDNA sequence for clone 62227111 R0396:E06

[2226] SEQ ID NO:2179 is the determined cDNA sequence for clone 62227112 R0396:E07

[2227] SEQ ID NO:2180 is the determined cDNA sequence for clone 62227114 R0396:E09

[2228] SEQ ID NO:2181 is the determined cDNA sequence for clone 62227115 R0396:E10

[2229] SEQ ID NO:2182 is the determined cDNA sequence for clone 62227116 R0396:E11

[2230] SEQ ID NO:2183 is the determined cDNA sequence for clone 62227117 R0396:E12

[2231] SEQ ID NO:2184 is the determined cDNA sequence for clone 62227118 R0396:F01

[2232] SEQ ID NO:2185 is the determined cDNA sequence for clone 62227119 R0396:F02

[2233] SEQ ID NO:2186 is the determined cDNA sequence for clone 62227120 R0396:F03

[2234] SEQ ID NO:2187 is the determined cDNA sequence for clone 62227121 R0396:F04

[2235] SEQ ID NO:2188 is the determined cDNA sequence for clone 62227123 R0396:F06

[2236] SEQ ID NO:2189 is the determined cDNA sequence for clone 62227124 R0396:F07

[2237] SEQ ID NO:2190 is the determined cDNA sequence for clone 62227125 R0396:F08

[2238] SEQ ID NO:2191 is the determined cDNA sequence for clone 62227126 R0396:F09

[2239] SEQ ID NO:2192 is the determined cDNA sequence for clone 62227127 R0396:F10

[2240] SEQ ID NO:2193 is the determined cDNA sequence for clone 62227128 R0396:F11

[2241] SEQ ID NO:2194 is the determined cDNA sequence for clone 62227129 R0396:F12

[2242] SEQ ID NO:2195 is the determined cDNA sequence for clone 62227130 R0396:G01

[2243] SEQ ID NO:2196 is the determined cDNA sequence for clone 62227133 R0396:G04

[2244] SEQ ID NO:2197 is the determined cDNA sequence for clone 62227134 R0396:G05

[2245] SEQ ID NO:2198 is the determined cDNA sequence for clone 62227135 R0396:G06

[2246] SEQ ID NO:2199 is the determined cDNA sequence for clone 62227136 R0396:G07

[2247] SEQ ID NO:2200 is the determined cDNA sequence for clone 62227138 R0396:G09

[2248] SEQ ID NO:2201 is the determined cDNA sequence for clone 62227139 R0396:G10

[2249] SEQ ID NO:2202 is the determined cDNA sequence for clone 62227140 R0396:G11

[2250] SEQ ID NO:2203 is the determined cDNA sequence for clone 62227141 R0396:G12

[2251] SEQ ID NO:2204 is the determined cDNA sequence for clone 62227142 R0396:H01

[2252] SEQ ID NO:2205 is the determined cDNA sequence for clone 62227144 R0396:H03

[2253] SEQ ID NO:2206 is the determined cDNA sequence for clone 62227145 R0396:H04

[2254] SEQ ID NO:2207 is the determined cDNA sequence for clone 62227147 R0396:H06

[2255] SEQ ID NO:2208 is the determined cDNA sequence for clone 62227148 R0396:H07

[2256] SEQ ID NO:2209 is the determined cDNA sequence for clone 62227149 R0396:H08

[2257] SEQ ID NO:2210 is the determined cDNA sequence for clone 62227151 R0396:H10

[2258] SEQ ID NO:2211 is the determined cDNA sequence for clone 62227152 R0396:H11

[2259] SEQ ID NO:2212 is the determined cDNA sequence for clone 62296817 R0397:A03

[2260] SEQ ID NO:2213 is the determined cDNA sequence for clone 62296818 R0397:A05

[2261] SEQ ID NO:2214 is the determined cDNA sequence for clone 62296820 R0397:A07

[2262] SEQ ID NO:2215 is the determined cDNA sequence for clone 62296821 R0397:A08

[2263] SEQ ID NO:2216 is the determined cDNA sequence for clone 62296822 R0397:A09

[2264] SEQ ID NO:2217 is the determined cDNA sequence for clone 62296824 R0397:A11

[2265] SEQ ID NO:2218 is the determined cDNA sequence for clone 62296825 R0397:A12

[2266] SEQ ID NO:2219 is the determined cDNA sequence for clone 62296827 R0397:B02

[2267] SEQ ID NO:2220 is the determined cDNA sequence for clone 62296828 R0397:B03

[2268] SEQ ID NO:2221 is the determined cDNA sequence for clone 62296829 R0397:B04

[2269] SEQ ID NO:2222 is the determined cDNA sequence for clone 62296830 R0397:B05

[2270] SEQ ID NO:2223 is the determined cDNA sequence for clone 62296831 R0397:B06

[2271] SEQ ID NO:2224 is the determined cDNA sequence for clone 62296832 R0397:B07

[2272] SEQ ID NO:2225 is the determined cDNA sequence for clone 62296834 R0397:B09

[2273] SEQ ID NO:2226 is the determined cDNA sequence for clone 62296835 R0397:B10

[2274] SEQ ID NO:2227 is the determined cDNA sequence for clone 62296836 R0397:B11

[2275] SEQ ID NO:2228 is the determined cDNA sequence for clone 62296837 R0397:B12

[2276] SEQ ID NO:2229 is the determined cDNA sequence for clone 62296838 R0397:C01

[2277] SEQ ID NO:2230 is the determined cDNA sequence for clone 62296840 R0397:C03

[2278] SEQ ID NO:2231 is the determined cDNA sequence for clone 62296841 R0397:C04

[2279] SEQ ID NO:2232 is the determined cDNA sequence for clone 62296842 R0397:C05

[2280] SEQ ID NO:2233 is the determined cDNA sequence for clone 62296843 R0397:C06

[2281] SEQ ID NO:2234 is the determined cDNA sequence for clone 62296844 R0397:C07

[2282] SEQ ID NO:2235 is the determined cDNA sequence for clone 62296845 R0397:C08

[2283] SEQ ID NO:2236 is the determined cDNA sequence for clone 62296846 R0397:C09

[2284] SEQ ID NO:2237 is the determined cDNA sequence for clone 62296847 R0397:C10

[2285] SEQ ID NO:2238 is the determined cDNA sequence for clone 62296848 R0397:C11

[2286] SEQ ID NO:2239 is the determined cDNA sequence for clone 62296849 R0397:C12

[2287] SEQ ID NO:2240 is the determined cDNA sequence for clone 62296851 R0397:D02

[2288] SEQ ID NO:2241 is the determined cDNA sequence for clone 62296854 R0397:D05

[2289] SEQ ID NO:2242 is the determined cDNA sequence for clone 62296855 R0397:D06

[2290] SEQ ID NO:2243 is the determined cDNA sequence for clone 62296856 R0397:D07

[2291] SEQ ID NO:2244 is the determined cDNA sequence for clone 62296857 R0397:D08

[2292] SEQ ID NO:2245 is the determined cDNA sequence for clone 62296858 R0397:D09

[2293] SEQ ID NO:2246 is the determined cDNA sequence for clone 62296860 R0397:D11

[2294] SEQ ID NO:2247 is the determined cDNA sequence for clone 62296861 R0397:D12

[2295] SEQ ID NO:2248 is the determined cDNA sequence for clone 62296862 R0397:E01

[2296] SEQ ID NO:2249 is the determined cDNA sequence for clone 62296864 R0397:E03

[2297] SEQ ID NO:2250 is the determined cDNA sequence for clone 62296865 R0397:E04

[2298] SEQ ID NO:2251 is the determined cDNA sequence for clone 62296866 R0397:E05

[2299] SEQ ID NO:2252 is the determined cDNA sequence for clone 62296867 R0397:E06

[2300] SEQ ID NO:2253 is the determined cDNA sequence for clone 62296869 R0397:E08

[2301] SEQ ID NO:2254 is the determined cDNA sequence for clone 62296870 R0397:E09

[2302] SEQ ID NO:2255 is the determined cDNA sequence for clone 62296871 R0397:E10

[2303] SEQ ID NO:2256 is the determined cDNA sequence for clone 62296872 R0397:E11

[2304] SEQ ID NO:2257 is the determined cDNA sequence for clone 62296873 R0397:E12

[2305] SEQ ID NO:2258 is the determined cDNA sequence for clone 62296874 R0397:F01

[2306] SEQ ID NO:2259 is the determined cDNA sequence for clone 62296875 R0397:F02

[2307] SEQ ID NO:2260 is the determined cDNA sequence for clone 62296876 R0397:F03

[2308] SEQ ID NO:2261 is the determined cDNA sequence for clone 62296877 R0397:F04

[2309] SEQ ID NO:2262 is the determined cDNA sequence for clone 62296878 R0397:F05

[2310] SEQ ID NO:2263 is the determined cDNA sequence for clone 62296879 R0397:F06

[2311] SEQ ID NO:2264 is the determined cDNA sequence for clone 62296880 R0397:F07

[2312] SEQ ID NO:2265 is the determined cDNA sequence for clone 62296881 R0397:F08

[2313] SEQ ID NO:2266 is the determined cDNA sequence for clone 62296882 R0397:F09

[2314] SEQ ID NO:2267 is the determined cDNA sequence for clone 62296883 R0397:F10

[2315] SEQ ID NO:2268 is the determined cDNA sequence for clone 62296884 R0397:F11

[2316] SEQ ID NO:2269 is the determined cDNA sequence for clone 62296885 R0397:F12

[2317] SEQ ID NO:2270 is the determined cDNA sequence for clone 62296886 R0397:G01

[2318] SEQ ID NO:2271 is the determined cDNA sequence for clone 62296887 R0397:G02

[2319] SEQ ID NO:2272 is the determined cDNA sequence for clone 62296889 R0397:G04

[2320] SEQ ID NO:2273 is the determined cDNA sequence for clone 62296890 R0397:G05

[2321] SEQ ID NO:2274 is the determined cDNA sequence for clone 62296891 R0397:G06

[2322] SEQ ID NO:2275 is the determined cDNA sequence for clone 62296892 R0397:G07

[2323] SEQ ID NO:2276 is the determined cDNA sequence for clone 62296893 R0397:G08

[2324] SEQ ID NO:2277 is the determined cDNA sequence for clone 62296895 R0397:G10

[2325] SEQ ID NO:2278 is the determined cDNA sequence for clone 62296897 R0397:G12

[2326] SEQ ID NO:2279 is the determined cDNA sequence for clone 62296898 R0397:H01

[2327] SEQ ID NO:2280 is the determined cDNA sequence for clone 62296899 R0397:H02

[2328] SEQ ID NO:2281 is the determined cDNA sequence for clone 62296900 R0397:H03

[2329] SEQ ID NO:2282 is the determined cDNA sequence for clone 62296902 R0397:H05

[2330] SEQ ID NO:2283 is the determined cDNA sequence for clone 62296904 R0397:H07

[2331] SEQ ID NO:2284 is the determined cDNA sequence for clone 62296905 R0397:H08

[2332] SEQ ID NO:2285 is the determined cDNA sequence for clone 62296906 R0397:H09

[2333] SEQ ID NO:2286 is the determined cDNA sequence for clone 62296907 R0397:H10

[2334] SEQ ID NO:2287 is the determined cDNA sequence for clone 62296908 R0397:H11

[2335] SEQ ID NO:2288 is the determined cDNA sequence for clone 62328788 R0398:A02

[2336] SEQ ID NO:2289 is the determined cDNA sequence for clone 62328789 R0398:A03

[2337] SEQ ID NO:2290 is the determined cDNA sequence for clone 62328790 R0398:A05

[2338] SEQ ID NO:2291 is the determined cDNA sequence for clone 62328791 R0398:A06

[2339] SEQ ID NO:2292 is the determined cDNA sequence for clone 62328792 R0398:A07

[2340] SEQ ID NO:2293 is the determined cDNA sequence for clone 62328794 R0398:A09

[2341] SEQ ID NO:2294 is the determined cDNA sequence for clone 62328795 R0398:A10

[2342] SEQ ID NO:2295 is the determined cDNA sequence for clone 62328796 R0398:A11

[2343] SEQ ID NO:2296 is the determined cDNA sequence for clone 62328798 R0398:B01

[2344] SEQ ID NO:2297 is the determined cDNA sequence for clone 62328799 R0398:B02

[2345] SEQ ID NO:2298 is the determined cDNA sequence for clone 62328800 R0398:B03

[2346] SEQ ID NO:2299 is the determined cDNA sequence for clone 62328802 R0398:B05

[2347] SEQ ID NO:2300 is the determined cDNA sequence for clone 62328803 R0398:B06

[2348] SEQ ID NO:2301 is the determined cDNA sequence for clone 62328804 R0398:B07

[2349] SEQ ID NO:2302 is the determined cDNA sequence for clone 62328805 R0398:B08

[2350] SEQ ID NO:2303 is the determined cDNA sequence for clone 62328806 R0398:B09

[2351] SEQ ID NO:2304 is the determined cDNA sequence for clone 62328807 R0398:B10

[2352] SEQ ID NO:2305 is the determined cDNA sequence for clone 62328808 R0398:B11

[2353] SEQ ID NO:2306 is the determined cDNA sequence for clone 62328809 R0398:B12

[2354] SEQ ID NO:2307 is the determined cDNA sequence for clone 62328810 R0398:C01

[2355] SEQ ID NO:2308 is the determined cDNA sequence for clone 62328811 R0398:C02

[2356] SEQ ID NO:2309 is the determined cDNA sequence for clone 62328814 R0398:C05

[2357] SEQ ID NO:2310 is the determined cDNA sequence for clone 62328815 R0398:C06

[2358] SEQ ID NO:2311 is the determined cDNA sequence for clone 62328816 R0398:C07

[2359] SEQ ID NO:2312 is the determined cDNA sequence for clone 62328817 R0398:C08

[2360] SEQ ID NO:2313 is the determined cDNA sequence for clone 62328818 R0398:C09

[2361] SEQ ID NO:2314 is the determined cDNA sequence for clone 62328819 R0398:C10

[2362] SEQ ID NO:2315 is the determined cDNA sequence for clone 62328820 R0398:C11

[2363] SEQ ID NO:2316 is the determined cDNA sequence for clone 62328821 R0398:C12

[2364] SEQ ID NO:2317 is the determined cDNA sequence for clone 62328822 R0398:D01

[2365] SEQ ID NO:2318 is the determined cDNA sequence for clone 62328823 R0398:D02

[2366] SEQ ID NO:2319 is the determined cDNA sequence for clone 62328826 R0398:D05

[2367] SEQ ID NO:2320 is the determined cDNA sequence for clone 62328827 R0398:D06

[2368] SEQ ID NO:2321 is the determined cDNA sequence for clone 62328828 R0398:D07

[2369] SEQ ID NO:2322 is the determined cDNA sequence for clone 62328829 R0398:D08

[2370] SEQ ID NO:2323 is the determined cDNA sequence for clone 62328830 R0398:D09

[2371] SEQ ID NO:2324 is the determined cDNA sequence for clone 62328831 R0398:D10

[2372] SEQ ID NO:2325 is the determined cDNA sequence for clone 62328832 R0398:D11

[2373] SEQ ID NO:2326 is the determined cDNA sequence for clone 62328833 R0398:D12

[2374] SEQ ID NO:2327 is the determined cDNA sequence for clone 62328834 R0398:E01

[2375] SEQ ID NO:2328 is the determined cDNA sequence for clone 62328836 R0398:E03

[2376] SEQ ID NO:2329 is the determined cDNA sequence for clone 62328837 R0398:E04

[2377] SEQ ID NO:2330 is the determined cDNA sequence for clone 62328838 R0398:E05

[2378] SEQ ID NO:2331 is the determined cDNA sequence for clone 62328839 R0398:E06

[2379] SEQ ID NO:2332 is the determined cDNA sequence for clone 62328840 R0398:E07

[2380] SEQ ID NO:2333 is the determined cDNA sequence for clone 62328841 R0398:E08

[2381] SEQ ID NO:2334 is the determined cDNA sequence for clone 62328842 R0398:E09

[2382] SEQ ID NO:2335 is the determined cDNA sequence for clone 62328843 R0398:E10

[2383] SEQ ID NO:2336 is the determined cDNA sequence for clone 62328844 R0398:E11

[2384] SEQ ID NO:2337 is the determined cDNA sequence for clone 62328845 R0398:E12

[2385] SEQ ID NO:2338 is the determined cDNA sequence for clone 62328846 R0398:F01

[2386] SEQ ID NO:2339 is the determined cDNA sequence for clone 62328847 R0398:F02

[2387] SEQ ID NO:2340 is the determined cDNA sequence for clone 62328848 R0398:F03

[2388] SEQ ID NO:2341 is the determined cDNA sequence for clone 62328849 R0398:F04

[2389] SEQ ID NO:2342 is the determined cDNA sequence for clone 62328850 R0398:F05

[2390] SEQ ID NO:2343 is the determined cDNA sequence for clone 62328851 R0398:F06

[2391] SEQ ID NO:2344 is the determined cDNA sequence for clone 62328852 R0398:F07

[2392] SEQ ID NO:2345 is the determined cDNA sequence for clone 62328853 R0398:F08

[2393] SEQ ID NO:2346 is the determined cDNA sequence for clone 62328855 R0398:F10

[2394] SEQ ID NO:2347 is the determined cDNA sequence for clone 62328856 R0398:F11

[2395] SEQ ID NO:2348 is the determined cDNA sequence for clone 62328857 R0398:F12

[2396] SEQ ID NO:2349 is the determined cDNA sequence for clone 62328858 R0398:G01

[2397] SEQ ID NO:2350 is the determined cDNA sequence for clone 62328859 R0398:G02

[2398] SEQ ID NO:2351 is the determined cDNA sequence for clone 62328860 R0398:G03

[2399] SEQ ID NO:2352 is the determined cDNA sequence for clone 62328861 R0398:G04

[2400] SEQ ID NO:2353 is the determined cDNA sequence for clone 62328862 R0398:G05

[2401] SEQ ID NO:2354 is the determined cDNA sequence for clone 62328863 R0398:G06

[2402] SEQ ID NO:2355 is the determined cDNA sequence for clone 62328865 R0398:G08

[2403] SEQ ID NO:2356 is the determined cDNA sequence for clone 62328866 R0398:G09

[2404] SEQ ID NO:2357 is the determined cDNA sequence for clone 62328867 R0398:G10

[2405] SEQ ID NO:2358 is the determined cDNA sequence for clone 62328868 R0398:G11

[2406] SEQ ID NO:2359 is the determined cDNA sequence for clone 62328869 R0398:G12

[2407] SEQ ID NO:2360 is the determined cDNA sequence for clone 62328870 R0398:H01

[2408] SEQ ID NO:2361 is the determined cDNA sequence for clone 62328871 R0398:H02

[2409] SEQ ID NO:2362 is the determined cDNA sequence for clone 62328872 R0398:H03

[2410] SEQ ID NO:2363 is the determined cDNA sequence for clone 62328873 R0398:H04

[2411] SEQ ID NO:2364 is the determined cDNA sequence for clone 62328874 R0398:H05

[2412] SEQ ID NO:2365 is the determined cDNA sequence for clone 62328875 R0398:H06

[2413] SEQ ID NO:2366 is the determined cDNA sequence for clone 62328876 R0398:H07

[2414] SEQ ID NO:2367 is the determined cDNA sequence for clone 62328877 R0398:H08

[2415] SEQ ID NO:2368 is the determined cDNA sequence for clone 62328878 R0398:H09

[2416] SEQ ID NO:2369 is the determined cDNA sequence for clone 62328879 R0398:H10

[2417] SEQ ID NO:2370 is the determined cDNA sequence for clone 62328880 R0398:H11

[2418] SEQ ID NO:2371 is the determined cDNA sequence for clone 62296072 R0399:A02

[2419] SEQ ID NO:2372 is the determined cDNA sequence for clone 62296073 R0399:A03

[2420] SEQ ID NO:2373 is the determined cDNA sequence for clone 62296074 R0399:A05

[2421] SEQ ID NO:2374 is the determined cDNA sequence for clone 62296075 R0399:A06

[2422] SEQ ID NO:2375 is the determined cDNA sequence for clone 62296076 R0399:A07

[2423] SEQ ID NO:2376 is the determined cDNA sequence for clone 62296077 R0399:A08

[2424] SEQ ID NO:2377 is the determined cDNA sequence for clone 62296078 R0399:A09

[2425] SEQ ID NO:2378 is the determined cDNA sequence for clone 62296079 R0399:A10

[2426] SEQ ID NO:2379 is the determined cDNA sequence for clone 62296080 R0399:A11

[2427] SEQ ID NO:2380 is the determined cDNA sequence for clone 62296081 R0399:A12

[2428] SEQ ID NO:2381 is the determined cDNA sequence for clone 62296082 R0399:B01

[2429] SEQ ID NO:2382 is the determined cDNA sequence for clone 62296083 R0399:B02

[2430] SEQ ID NO:2383 is the determined cDNA sequence for clone 62296084 R0399:B03

[2431] SEQ ID NO:2384 is the determined cDNA sequence for clone 62296085 R0399:B04

[2432] SEQ ID NO:2385 is the determined cDNA sequence for clone 62296086 R0399:B05

[2433] SEQ ID NO:2386 is the determined cDNA sequence for clone 62296087 R0399:B06

[2434] SEQ ID NO:2387 is the determined cDNA sequence for clone 62296088 R0399:B07

[2435] SEQ ID NO:2388 is the determined cDNA sequence for clone 62296089 R0399:B08

[2436] SEQ ID NO:2389 is the determined cDNA sequence for clone 62296090 R0399:B09

[2437] SEQ ID NO:2390 is the determined cDNA sequence for clone 62296091 R0399:B10

[2438] SEQ ID NO:2391 is the determined cDNA sequence for clone 62296092 R0399:B11

[2439] SEQ ID NO:2392 is the determined cDNA sequence for clone 62296093 R0399:B12

[2440] SEQ ID NO:2393 is the determined cDNA sequence for clone 62296094 R0399:C01

[2441] SEQ ID NO:2394 is the determined cDNA sequence for clone 62296095 R0399:C02

[2442] SEQ ID NO:2395 is the determined cDNA sequence for clone 62296096 R0399:C03

[2443] SEQ ID NO:2396 is the determined cDNA sequence for clone 62296097 R0399:C04

[2444] SEQ ID NO:2397 is the determined cDNA sequence for clone 62296098 R0399:C05

[2445] SEQ ID NO:2398 is the determined cDNA sequence for clone 62296099 R0399:C06

[2446] SEQ ID NO:2399 is the determined cDNA sequence for clone 62296100 R0399:C07

[2447] SEQ ID NO:2400 is the determined cDNA sequence for clone 62296101 R0399:C08

[2448] SEQ ID NO:2401 is the determined cDNA sequence for clone 62296102 R0399:C09

[2449] SEQ ID NO:2402 is the determined cDNA sequence for clone 62296103 R0399:C10

[2450] SEQ ID NO:2403 is the determined cDNA sequence for clone 62296104 R0399:C11

[2451] SEQ ID NO:2404 is the determined cDNA sequence for clone 62296105 R0399:C12

[2452] SEQ ID NO:2405 is the determined cDNA sequence for clone 62296107 R0399:D02

[2453] SEQ ID NO:2406 is the determined cDNA sequence for clone 62296108 R0399:D03

[2454] SEQ ID NO:2407 is the determined cDNA sequence for clone 62296109 R0399:D04

[2455] SEQ ID NO:2408 is the determined cDNA sequence for clone 62296110 R0399:D05

[2456] SEQ ID NO:2409 is the determined cDNA sequence for clone 62296111 R0399:D06

[2457] SEQ ID NO:2410 is the determined cDNA sequence for clone 62296112 R0399:D07

[2458] SEQ ID NO:2411 is the determined cDNA sequence for clone 62296113 R0399:D08

[2459] SEQ ID NO:2412 is the determined cDNA sequence for clone 62296114 R0399:D09

[2460] SEQ ID NO:2413 is the determined cDNA sequence for clone 62296116 R0399:D11

[2461] SEQ ID NO:2414 is the determined cDNA sequence for clone 62296117 R0399:D12

[2462] SEQ ID NO:2415 is the determined cDNA sequence for clone 62296118 R0399:E01

[2463] SEQ ID NO:2416 is the determined cDNA sequence for clone 62296119 R0399:E02

[2464] SEQ ID NO:2417 is the determined cDNA sequence for clone 62296120 R0399:E03

[2465] SEQ ID NO:2418 is the determined cDNA sequence for clone 62296121 R0399:E04

[2466] SEQ ID NO:2419 is the determined cDNA sequence for clone 62296122 R0399:E05

[2467] SEQ ID NO:2420 is the determined cDNA sequence for clone 62296123 R0399:E06

[2468] SEQ ID NO:2421 is the determined cDNA sequence for clone 62296124 R0399:E07

[2469] SEQ ID NO:2422 is the determined cDNA sequence for clone 62296126 R0399:E09

[2470] SEQ ID NO:2423 is the determined cDNA sequence for clone 62296128 R0399:E11

[2471] SEQ ID NO:2424 is the determined cDNA sequence for clone 62296129 R0399:E12

[2472] SEQ ID NO:2425 is the determined cDNA sequence for clone 62296130 R0399:F01

[2473] SEQ ID NO:2426 is the determined cDNA sequence for clone 62296131 R0399:F02

[2474] SEQ ID NO:2427 is the determined cDNA sequence for clone 62296132 R0399:F03

[2475] SEQ ID NO:2428 is the determined cDNA sequence for clone 62296133 R0399:F04

[2476] SEQ ID NO:2429 is the determined cDNA sequence for clone 62296134 R0399:F05

[2477] SEQ ID NO:2430 is the determined cDNA sequence for clone 62296135 R0399:F06

[2478] SEQ ID NO:2431 is the determined cDNA sequence for clone 62296136 R0399:F07

[2479] SEQ ID NO:2432 is the determined cDNA sequence for clone 62296137 R0399:F08

[2480] SEQ ID NO:2433 is the determined cDNA sequence for clone 62296138 R0399:F09

[2481] SEQ ID NO:2434 is the determined cDNA sequence for clone 62296139 R0399:F10

[2482] SEQ ID NO:2435 is the determined cDNA sequence for clone 62296140 R0399:F11

[2483] SEQ ID NO:2436 is the determined cDNA sequence for clone 62296141 R0399:F12

[2484] SEQ ID NO:2437 is the determined cDNA sequence for clone 62296142 R0399:G01

[2485] SEQ ID NO:2438 is the determined cDNA sequence for clone 62296143 R0399:G02

[2486] SEQ ID NO:2439 is the determined cDNA sequence for clone 62296144 R0399:G03

[2487] SEQ ID NO:2440 is the determined cDNA sequence for clone 62296145 R0399:G04

[2488] SEQ ID NO:2441 is the determined cDNA sequence for clone 62296146 R0399:G05

[2489] SEQ ID NO:2442 is the determined cDNA sequence for clone 62296147 R0399:G06

[2490] SEQ ID NO:2443 is the determined cDNA sequence for clone 62296148 R0399:G07

[2491] SEQ ID NO:2444 is the determined cDNA sequence for clone 62296149 R0399:G08

[2492] SEQ ID NO:2445 is the determined cDNA sequence for clone 62296150 R0399:G09

[2493] SEQ ID NO:2446 is the determined cDNA sequence for clone 62296151 R0399:G10

[2494] SEQ ID NO:2447 is the determined cDNA sequence for clone 62296152 R0399:G11

[2495] SEQ ID NO:2448 is the determined cDNA sequence for clone 62296153 R0399:G12

[2496] SEQ ID NO:2449 is the determined cDNA sequence for clone 62296154 R0399:H01

[2497] SEQ ID NO:2450 is the determined cDNA sequence for clone 62296155 R0399:H02

[2498] SEQ ID NO:2451 is the determined cDNA sequence for clone 62296156 R0399:H03

[2499] SEQ ID NO:2452 is the determined cDNA sequence for clone 62296157 R0399:H04

[2500] SEQ ID NO:2453 is the determined cDNA sequence for clone 62296158 R0399:H05

[2501] SEQ ID NO:2454 is the determined cDNA sequence for clone 62296159 R0399:H06

[2502] SEQ ID NO:2455 is the determined cDNA sequence for clone 62296161 R0399:H08

[2503] SEQ ID NO:2456 is the determined cDNA sequence for clone 62296162 R0399:H09

[2504] SEQ ID NO:2457 is the determined cDNA sequence for clone 62296164 R0399:H11

[2505] SEQ ID NO:2458 is the determined cDNA sequence for clone 62295979 R0400:A02

[2506] SEQ ID NO:2459 is the determined cDNA sequence for clone 62295981 R0400:A05

[2507] SEQ ID NO:2460 is the determined cDNA sequence for clone 62295982 R0400:A06

[2508] SEQ ID NO:2461 is the determined cDNA sequence for clone 62295983 R0400:A07

[2509] SEQ ID NO:2462 is the determined cDNA sequence for clone 62295984 R0400:A08

[2510] SEQ ID NO:2463 is the determined cDNA sequence for clone 62295986 R0400:A10

[2511] SEQ ID NO:2464 is the determined cDNA sequence for clone 62295987 R0400:A11

[2512] SEQ ID NO:2465 is the determined cDNA sequence for clone 62295988 R0400:A12

[2513] SEQ ID NO:2466 is the determined cDNA sequence for clone 62295990 R0400:B02

[2514] SEQ ID NO:2467 is the determined cDNA sequence for clone 62295991 R0400:B03

[2515] SEQ ID NO:2468 is the determined cDNA sequence for clone 62295992 R0400:B04

[2516] SEQ ID NO:2469 is the determined cDNA sequence for clone 62295993 R0400:B05

[2517] SEQ ID NO:2470 is the determined cDNA sequence for clone 62295994 R0400:B06

[2518] SEQ ID NO:2471 is the determined cDNA sequence for clone 62295995 R0400:B07

[2519] SEQ ID NO:2472 is the determined cDNA sequence for clone 62295996 R0400:B08

[2520] SEQ ID NO:2473 is the deter-mined cDNA sequence for clone 62295997 R0400:B09

[2521] SEQ ID NO:2474 is the determined cDNA sequence for clone 62295998 R0400:B10

[2522] SEQ ID NO:2475 is the determined cDNA sequence for clone 62295999 R0400:B11

[2523] SEQ ID NO:2476 is the determined cDNA sequence for clone 62296000 R0400:B12

[2524] SEQ ID NO:2477 is the determined cDNA sequence for clone 62296001 R0400:C01

[2525] SEQ ID NO:2478 is the determined cDNA sequence for clone 62296002 R0400:C02

[2526] SEQ ID NO:2479 is the determined cDNA sequence for clone 62296003 R0400:C03

[2527] SEQ ID NO:2480 is the determined cDNA sequence for clone 62296005 R0400:C05

[2528] SEQ ID NO:2481 is the determined cDNA sequence for clone 62296006 R0400:C06

[2529] SEQ ID NO:2482 is the determined cDNA sequence for clone 62296008 R0400:C08

[2530] SEQ ID NO:2483 is the determined cDNA sequence for clone 62296009 R0400:C09

[2531] SEQ ID NO:2484 is the determined cDNA sequence for clone 62296010 R0400:C10

[2532] SEQ ID NO:2485 is the determined cDNA sequence for clone 62296012 R0400:C12

[2533] SEQ ID NO:2486 is the determined cDNA sequence for clone 62296013 R0400:D01

[2534] SEQ ID NO:2487 is the determined cDNA sequence for clone 62296014 R0400:D02

[2535] SEQ ID NO:2488 is the determined cDNA sequence for clone 62296016 R0400:D04

[2536] SEQ ID NO:2489 is the determined cDNA sequence for clone 62296017 R0400:D05

[2537] SEQ ID NO:2490 is the determined cDNA sequence for clone 62296018 R0400:D06

[2538] SEQ ID NO:2491 is the determined cDNA sequence for clone 62296019 R0400:D07

[2539] SEQ ID NO:2492 is the determined cDNA sequence for clone 62296020 R0400:D08

[2540] SEQ ID NO:2493 is the determined cDNA sequence for clone 62296021 R0400:D09

[2541] SEQ ID NO:2494 is the determined cDNA sequence for clone 62296022 R0400:D10

[2542] SEQ ID NO:2495 is the determined cDNA sequence for clone 62296023 R0400:D11

[2543] SEQ ID NO:2496 is the determined cDNA sequence for clone 62296024 R0400:D12

[2544] SEQ ID NO:2497 is the determined cDNA sequence for clone 62296026 R0400:E02

[2545] SEQ ID NO:2498 is the determined cDNA sequence for clone 62296028 R0400:E04

[2546] SEQ ID NO:2499 is the determined cDNA sequence for clone 62296030 R0400:E06

[2547] SEQ ID NO:2500 is the determined cDNA sequence for clone 62296033 R0400:E09

[2548] SEQ ID NO:2501 is the determined cDNA sequence for clone 62296034 R0400:E10

[2549] SEQ ID NO:2502 is the determined cDNA sequence for clone 62296035 R0400:E11

[2550] SEQ ID NO:2503 is the determined cDNA sequence for clone 62296036 R0400:E12

[2551] SEQ ID NO:2504 is the determined cDNA sequence for clone 62296037 R0400:F01

[2552] SEQ ID NO:2505 is the determined cDNA sequence for clone 62296038 R0400:F02

[2553] SEQ ID NO:2506 is the determined cDNA sequence for clone 62296039 R0400:F03

[2554] SEQ ID NO:2507 is the determined cDNA sequence for clone 62296040 R0400:F04

[2555] SEQ ID NO:2508 is the determined cDNA sequence for clone 62296041 R0400:F05

[2556] SEQ ID NO:2509 is the determined cDNA sequence for clone 62296043 R0400:F07

[2557] SEQ ID NO:2510 is the determined cDNA sequence for clone 62296045 R0400:F09

[2558] SEQ ID NO:2511 is the determined cDNA sequence for clone 62296046 R0400:F10

[2559] SEQ ID NO:2512 is the determined cDNA sequence for clone 62296047 R0400:F11

[2560] SEQ ID NO:2513 is the determined cDNA sequence for clone 62296048 R0400:F12

[2561] SEQ ID NO:2514 is the determined cDNA sequence for clone 62296049 R0400:G01

[2562] SEQ ID NO:2515 is the determined cDNA sequence for clone 62296050 R0400:G02

[2563] SEQ ID NO:2516 is the determined cDNA sequence for clone 62296051 R0400:G03

[2564] SEQ ID NO:2517 is the determined cDNA sequence for clone 62296052 R0400:G04

[2565] SEQ ID NO:2518 is the determined cDNA sequence for clone 62296053 R0400:G05

[2566] SEQ ID NO:2519 is the determined cDNA sequence for clone 62296054 R0400:G06

[2567] SEQ ID NO:2520 is the determined cDNA sequence for clone 62296057 R0400:G09

[2568] SEQ ID NO:2521 is the determined cDNA sequence for clone 62296058 R0400:G10

[2569] SEQ ID NO:2522 is the determined cDNA sequence for clone 62296059 R0400:G11

[2570] SEQ ID NO:2523 is the determined cDNA sequence for clone 62296060 R0400:G12

[2571] SEQ ID NO:2524 is the determined cDNA sequence for clone 62296062 R0400:H02

[2572] SEQ ID NO:2525 is the determined cDNA sequence for clone 62296064 R0400:H04

[2573] SEQ ID NO:2526 is the determined cDNA sequence for clone 62296065 R0400:H05

[2574] SEQ ID NO:2527 is the determined cDNA sequence for clone 62296066 R0400:H06

[2575] SEQ ID NO:2528 is the determined cDNA sequence for clone 62296067 R0400:H07

[2576] SEQ ID NO:2529 is the determined cDNA sequence for clone 62296068 R0400:H08

[2577] SEQ ID NO:2530 is the determined cDNA sequence for clone 62296069 R0400:H09

[2578] SEQ ID NO:2531 is the determined cDNA sequence for clone 62296070 R0400:H10

[2579] SEQ ID NO:2532 is the determined cDNA sequence for clone 62296071 R0400:H11

[2580] SEQ ID NO:2533 is the determined cDNA sequence for clone 4C_{—}78.SEQ

[2581] SEQ ID NO:2534 is the determined cDNA sequence for clone 4C_{—}28.SEQ

[2582] SEQ ID NO:2535 is the determined cDNA sequence for clone 4C_{—}29.SEQ

[2583] SEQ ID NO:2536 is the determined cDNA sequence for clone 4C_{—}50.SEQ

[2584] SEQ ID NO:2537 is the determined cDNA sequence for clone 4C_{—}16.SEQ

[2585] SEQ ID NO:2538 is the determined cDNA sequence for clone 4C_{—}71.SEQ

[2586] SEQ ID NO:2539 is the determined cDNA sequence for clone 4C_{—}26.SEQ

[2587] SEQ ID NO:2540 is the determined cDNA sequence for clone 4C_{—}30.SEQ

[2588] SEQ ID NO:2541 is the determined cDNA sequence for clone 4C_{—}46.SEQ

[2589] SEQ ID NO:2542 is the determined cDNA sequence for clone 4C_{—}12.SEQ

[2590] SEQ ID NO:2543 is the determined cDNA sequence for clone 4C_{—}61.SEQ

[2591] SEQ ID NO:2544 is the determined cDNA sequence for clone 4C_{—}63.SEQ

[2592] SEQ ID NO:2545 is the determined cDNA sequence for clone 4C_{—}69.SEQ

[2593] SEQ ID NO:2546 is the determined cDNA sequence for clone 4C_{—}34.SEQ

[2594] SEQ ID NO:2547 is the determined cDNA sequence for clone 4C_{—}48.SEQ

[2595] SEQ ID NO:2548 is the determined cDNA sequence for clone 4C_{—}11.SEQ

[2596] SEQ ID NO:2549 is the determined cDNA sequence for clone 4C_{—}44.SEQ

[2597] SEQ ID NO:2550 is the determined cDNA sequence for clone 4C_{—}80.SEQ

[2598] SEQ ID NO:2551 is the determined cDNA sequence for clone 4C_{—}25.SEQ

[2599] SEQ ID NO:2552 is the determined cDNA sequence for clone 4C_{—}40.SEQ

[2600] SEQ ID NO:2553 is the determined cDNA sequence for clone 4C_{—}58.SEQ

[2601] SEQ ID NO:2554 is the determined cDNA sequence for clone 4C_{—}38.SEQ

[2602] SEQ ID NO:2555 is the determined cDNA sequence for clone 4C_{—}76.SEQ

[2603] SEQ ID NO:2556 is the determined cDNA sequence for clone 4C_{—}64.SEQ

[2604] SEQ ID NO:2557 is the determined cDNA sequence for clone 4C_{—}73.SEQ

[2605] SEQ ID NO:2558 is the determined cDNA sequence for clone 4C_{—}52.SEQ

[2606] SEQ ID NO:2559 is the determined cDNA sequence for clone 4C_{—}27.SEQ

[2607] SEQ ID NO:2560 is the determined cDNA sequence for clone 4C_{—}22.SEQ

[2608] SEQ ID NO:2561 is the determined cDNA sequence for clone 4C_{—}10.SEQ

[2609] SEQ ID NO:2562 is the determined cDNA sequence for clone 4C_{—}60.SEQ

[2610] SEQ ID NO:2563 is the determined cDNA sequence for clone 4C_{—}81.SEQ

[2611] SEQ ID NO:2564 is the determined cDNA sequence for clone 4C_{—}41.SEQ

[2612] SEQ ID NO:2565 is the determined cDNA sequence for clone 4C_{—}47.SEQ

[2613] SEQ ID NO:2566 is the determined cDNA sequence for clone 4C_{—}21.SEQ

[2614] SEQ ID NO:2567 is the determined cDNA sequence for clone 4C_{—}65.SEQ

[2615] SEQ ID NO:2568 is the determined cDNA sequence for clone 4C_{—}74.SEQ

[2616] SEQ ID NO:2569 is the determined cDNA sequence for clone 4C_{—}5.SEQ

[2617] SEQ ID NO:2570 is the determined cDNA sequence for clone 4C_{—}51.SEQ

[2618] SEQ ID NO:2571 is the determined cDNA sequence for clone 4C75.SEQ

[2619] SEQ ID NO:2572 is the determined cDNA sequence for clone 4C_{—}6.SEQ

[2620] SEQ ID NO:2573 is the determined cDNA sequence for clone 4C_{—}35.SEQ

[2621] SEQ ID NO:2574 is the determined cDNA sequence for clone 4C_{—}57.SEQ

[2622] SEQ ID NO:2575 is the determined cDNA sequence for clone 4C_{—}33.SEQ

[2623] SEQ ID NO:2576 is the determined cDNA sequence for clone 4C_{—}9.SEQ

[2624] SEQ ID NO:2577 is the determined cDNA sequence for clone 4C_{—}72.SEQ

[2625] SEQ ID NO:2578 is the determined cDNA sequence for clone 4C_{—}8.SEQ

[2626] SEQ ID NO:2579 is the determined cDNA sequence for clone 4C_{—}68.SEQ

[2627] SEQ ID NO:2580 is the determined cDNA sequence for clone 4C_{—}54.SEQ

[2628] SEQ ID NO:2581 is the determined cDNA sequence for clone 4C_{—}32.SEQ

[2629] SEQ ID NO:2582 is the determined cDNA sequence for clone 4C_{—}82.SEQ

[2630] SEQ ID NO:2583 is the determined cDNA sequence for clone 4C_{—}4.SEQ

[2631] SEQ ID NO:2584 is the determined cDNA sequence for clone 4C_{—}18.SEQ

[2632] SEQ ID NO:2585 is the determined cDNA sequence for clone 4C_{—}86.SEQ

[2633] SEQ ID NO:2586 is the determined full-length cDNA sequence for clone C1466P that shows similarity to human TOP2A

[2634] SEQ ID NO:2587 is the determined full-length cDNA sequence for clone C1465P that shows similarity to human CDX1

[2635] SEQ ID NO:2588 is the determined full-length cDNA sequence for clone C1446P that shows similarity to FLJ21522

[2636] SEQ ID NO:2589 is the determined full-length cDNA sequence for clone C1444P that shows similarity to Claudin2

[2637] SEQ ID NO:2590 is the full-length protein sequence for clone C1444P, encoded by the cDNA sequence set forth in SEQ ID NO:2589

[2638] SEQ ID NO:2591 is the full-length protein sequence for clone C1446P encoded by the cDNA sequence set forth in SEQ ID NO:2588

[2639] SEQ ID NO:2592 is the full-length protein sequence for clone C1465P encoded by the cDNA sequence set forth in SEQ ID NO:2587

[2640] SEQ ID NO:2593 is the full-length protein sequence for clone C1466P encoded by the cDNA sequence set forth in SEQ ID NO:2585

[2641] SEQ ID NO:2594 is the determined cDNA sequence for clone R0363:E01

[2642] SEQ ID NO:2595 is the determined cDNA sequence for clone R0364:B08

[2643] SEQ ID NO:2596 is the determined cDNA sequence for clone R0366:G06

[2644] SEQ ID NO:2597 is the determined cDNA sequence for clone R0366:B10

[2645] SEQ ID NO:2598 is the determined cDNA sequence for clone R0369:H04

[2646] SEQ ID NO:2599 is the determined cDNA sequence for clone R0370:B06

[2647] SEQ ID NO:2600 is the determined cDNA sequence for clone R0372:A11

[2648] SEQ ID NO:2601 is the determined cDNA sequence for clone R0373:A02

[2649] SEQ ID NO:2602 is the determined full-length cDNA sequence for clone C638S_hiwi

[2650] SEQ ID NO:2603 is the full-length protein sequence for clone C638S_hiwi_ORF encoded by the cDNA sequence set forth in SEQ ID NO:2602

[2651] SEQ ID NO:2604 is the determined cDNA sequence for clone R0362:E12

[2652] SEQ ID NO:2605 is the determined full-length cDNA sequence for clone R0400:B8 that shows similarity to SCYA20

[2653] SEQ ID NO:2606 is the full-length protein sequence for SCYA20 encoded by the cDNA set forth in SEQ ID NO:2605

### DETAILED DESCRIPTION OF THE INVENTION

[2654] The present invention is directed generally to compositions and their use in the therapy and diagnosis of cancer, particularly colon cancer. As described further below, illustrative compositions of the present invention include, but are not restricted to, polypeptides, particularly immunogenic polypeptides, polynucleotides encoding such polypeptides, antibodies and other binding agents, antigen presenting cells (APCs) and immune system cells (e.g., T cells).

[2655] The practice of the present invention will employ, unless indicated specifically to the contrary, conventional methods of virology, immunology, microbiology, molecular biology and recombinant DNA techniques within the skill of the art, many of which are described below for the purpose of illustration. Such techniques are explained fully in the literature. See, e.g., Sambrook, et al. Molecular Cloning: A Laboratory Manual (2nd Edition, 1989); Maniatis et al. Molecular Cloning: A Laboratory Manual (1982); DNA Cloning: A Practical Approach, vol. I & II (D. Glover, ed.); Oligonucleotide Synthesis (N. Gait, ed., 1984); Nucleic Acid Hybridization (B. Hames & S. Higgins, eds., 1985); Transcription and Translation (B. Hames & S. Higgins, eds., 1984); Animal Cell Culture (R. Freshney, ed., 1986); Perbal, A Practical Guide to Molecular Cloning (1984).

[2656] All publications, patents and patent applications cited herein, whether supra or infra, are hereby incorporated by reference in their entirety.

[2657] As used in this specification and the appended claims, the singular forms “a,” “an” and “the” include plural references unless the content clearly dictates otherwise.

[2658] Polypeptide Compositions

[2659] As used herein, the term “polypeptide” “is used in its conventional meaning, i.e., as a sequence of amino acids. The polypeptides are not limited to a specific length of the product; thus, peptides, oligopeptides, and proteins are included within the definition of polypeptide, and such terms may be used interchangeably herein unless specifically indicated otherwise. This term also does not refer to or exclude post-expression modifications of the polypeptide, for example, glycosylations, acetylations, phosphorylations and the like, as well as other modifications known in the art, both naturally occurring and non-naturally occurring. A polypeptide may be an entire protein, or a subsequence thereof. Particular polypeptides of interest in the context of this invention are amino acid subsequences comprising epitopes, i.e., antigenic determinants substantially responsible for the immunogenic properties of a polypeptide and being capable of evoking an immune response.

[2660] Particularly illustrative polypeptides of the present invention comprise those encoded by a polynucleotide sequence set forth in any one of SEQ ID NO:1-2589, 2594-2602, and 2604-2605, or a sequence that hybridizes under moderately stringent conditions, or, alternatively, under highly stringent conditions, to a polynucleotide sequence set forth in any one of SEQ ID NO:1-2589, 2594-2602, and 2604-2605. Certain other illustrative polypeptides of the invention comprise amino acid sequences as set forth in any one of SEQ ID NOs:2590-2593, 2603, and 2606.

[2661] The polypeptides of the present invention are sometimes herein referred to as colon tumor proteins or colon tumor polypeptides, as an indication that their identification has been based at least in part upon their increased levels of expression in colon tumor samples. Thus, a “colon tumor polypeptide” or “colon tumor protein,” refers generally to a polypeptide sequence of the present invention, or a polynucleotide sequence encoding such a polypeptide, that is expressed in a substantial proportion of colon tumor samples, for example preferably greater than about 20%, more preferably greater than about 30%, and most preferably greater than about 50% or more of colon tumor samples tested, at a level that is at least two fold, and preferably at least five fold, greater than the level of expression in normal tissues, as determined using a representative assay provided herein. A colon tumor polypeptide sequence of the invention, based upon its increased level of expression in tumor cells, has particular utility both as a diagnostic marker as well as a therapeutic target, as further described below.

[2662] In certain preferred embodiments, the polypeptides of the invention are immunogenic, i.e., they react detectably within an immunoassay (such as an ELISA or T-cell stimulation assay) with antisera and/or T-cells from a patient with colon cancer. Screening for immunogenic activity can be performed using techniques well known to the skilled artisan. For example, such screens can be performed using methods such as those described in Harlow and Lane, Antibodies: A Laboratory Manual, Cold Spring Harbor Laboratory, 1988. In one illustrative example, a polypeptide may be immobilized on a solid support and contacted with patient sera to allow binding of antibodies within the sera to the immobilized polypeptide. Unbound sera may then be removed and bound antibodies detected using, for example, ¹²⁵I-labeled Protein A.

[2663] As would be recognized by the skilled artisan, immunogenic portions of the polypeptides disclosed herein are also encompassed by the present invention. An “immunogenic portion,” as used herein, is a fragment of an immunogenic polypeptide of the invention that itself is immunologically reactive (i.e., specifically binds) with the B-cells and/or T-cell surface antigen receptors that recognize the polypeptide. Immunogenic portions may generally be identified using well known techniques, such as those summarized in Paul, Fundamental Immunology, 3rd ed., 243-247 (Raven Press, 1993) and references cited therein. Such techniques include screening polypeptides for the ability to react with antigen-specific antibodies, antisera and/or T-cell lines or clones. As used herein, antisera and antibodies are “antigen-specific” if they specifically bind to an antigen (i.e., they react with the protein in an ELISA or other immunoassay, and do not react detectably with unrelated proteins). Such antisera and antibodies may be prepared as described herein, and using well-known techniques.

[2664] In one preferred embodiment, an immunogenic portion of a polypeptide of the present invention is a portion that reacts with antisera and/or T-cells at a level that is not substantially less than the reactivity of the full-length polypeptide (e.g., in an ELISA and/or T-cell reactivity assay). Preferably, the level of immunogenic activity of the immunogenic portion is at least about 50%, preferably at least about 70% and most preferably greater than about 90% of the immunogenicity for the full-length polypeptide. In some instances, preferred immunogenic portions will be identified that have a level of immunogenic activity greater than that of the corresponding full-length polypeptide, e.g., having greater than about 100% or 150% or more immunogenic activity.

[2665] In certain other embodiments, illustrative immunogenic portions may include peptides in which an N-terminal leader sequence and/or transmembrane domain have been deleted. Other illustrative immunogenic portions will contain a small N- and/or C-terminal deletion (e.g., 1-30 amino acids, preferably 5-15 amino acids), relative to the mature protein.

[2666] In another embodiment, a polypeptide composition of the invention may also comprise one or more polypeptides that are immunologically reactive with T cells and/or antibodies generated against a polypeptide of the invention, particularly a polypeptide having an amino acid sequence disclosed herein, or to an immunogenic fragment or variant thereof.

[2667] In another embodiment of the invention, polypeptides are provided that comprise one or more polypeptides that are capable of eliciting T cells and/or antibodies that are immunologically reactive with one or more polypeptides described herein, or one or more polypeptides encoded by contiguous nucleic acid sequences contained in the polynucleotide sequences disclosed herein, or immunogenic fragments or variants thereof, or to one or more nucleic acid sequences which hybridize to one or more of these sequences under conditions of moderate to high stringency.

[2668] The present invention, in another aspect, provides polypeptide fragments comprising at least about 5, 10, 15, 20, 25, 50, or 100 contiguous amino acids, or more, including all intermediate lengths, of polypeptide compositions set forth herein, such as those set forth in SEQ ID NOs:2590-2593, 2603, and 2606, or those encoded by a polynucleotide sequence set forth in a sequence of SEQ ID NO:1-2589, 2594-2602, and 2604-2605.

[2669] In another aspect, the present invention provides variants of the polypeptide compositions described herein. Polypeptide variants generally encompassed by the present invention will typically exhibit at least about 70%, 75%, 80%, 85%, 90%, 91%, 92%, 93%, 94%, 95%, 96%, 97%, 98%, or 99% or more identity (determined as described below), along its length, to a polypeptide sequences set forth herein.

[2670] In one preferred embodiment, the polypeptide fragments and variants provide by the present invention are immunologically reactive with an antibody and/or T-cell that reacts with a full-length polypeptide specifically set for the herein.

[2671] In another preferred embodiment, the polypeptide fragments and variants provided by the present invention exhibit a level of immunogenic activity of at least about 50%, preferably at least about 70%, and most preferably at least about 90% or more of that exhibited by a full-length polypeptide sequence specifically set forth herein.

[2672] A polypeptide “variant,” as the term is used herein, is a polypeptide that typically differs from a polypeptide specifically disclosed herein in one or more substitutions, deletions, additions and/or insertions. Such variants may be naturally occurring or may be synthetically generated, for example, by modifying one or more of the above polypeptide sequences of the invention and evaluating their immunogenic activity as described herein and/or using any of a number of techniques well known in the art.

[2673] For example, certain illustrative variants of the polypeptides of the invention include those in which one or more portions, such as an N-terminal leader sequence or transmembrane domain, have been removed. Other illustrative variants include variants in which a small portion (e.g., 1-30 amino acids, preferably 5-15 amino acids) has been removed from the N- and/or C-terminal of the mature protein.

[2674] In many instances, a variant will contain conservative substitutions. A “conservative substitution” is one in which an amino acid is substituted for another amino acid that has similar properties, such that one skilled in the art of peptide chemistry would expect the secondary structure and hydropathic nature of the polypeptide to be substantially unchanged. As described above, modifications may be made in the structure of the polynucleotides and polypeptides of the present invention and still obtain a functional molecule that encodes a variant or derivative polypeptide with desirable characteristics, e.g., with immunogenic characteristics. When it is desired to alter the amino acid sequence of a polypeptide to create an equivalent, or even an improved, immunogenic variant or portion of a polypeptide of the invention, one skilled in the art will typically change one or more of the codons of the encoding DNA sequence according to Table 1.

[2675] For example, certain amino acids may be substituted for other amino acids in a protein structure without appreciable loss of interactive binding capacity with structures such as, for example, antigen-binding regions of antibodies or binding sites on substrate molecules. Since it is the interactive capacity and nature of a protein that defines that protein's biological functional activity, certain amino acid sequence substitutions can be made in a protein sequence, and, of course, its underlying DNA coding sequence, and nevertheless obtain a protein with like properties. It is thus contemplated that various changes may be made in the peptide sequences of the disclosed compositions, or corresponding DNA sequences which encode said peptides without appreciable loss of their biological utility or activity.

TABLE 1

| Amino Acids | | | Codons | | | | | |
|---|---|---|---|---|---|---|---|---|
| Alanine | Ala | A | GCA | GCC | GCG | GCU | | |
| Cysteine | Cys | C | UGC | UGU | | | | |
| Aspartic acid | Asp | D | GAC | GAU | | | | |
| Glutamic acid | Giu | E | GAA | GAG | | | | |
| Phenylalanine | Phe | F | UUC | UUU | | | | |
| Glycine | Gly | G | GGA | GGC | GGG | GGU | | |
| Histidine | His | H | CAC | CAU | | | | |
| Isoleucine | Ile | I | AUA | AUC | AUU | | | |
| Lysine | Lys | K | AAA | AAG | | | | |
| Leucine | Leu | L | UUA | UUG | CUA | CUC | CUG | CUU |
| Methionine | Met | M | AUG | | | | | |
| Asparagine | Asn | N | AAC | AAU | | | | |
| Proline | Pro | P | CCA | CCC | CCG | CCU | | |
| Giutamine | Gin | Q | CAA | CAG | | | | |
| Arginine | Arg | R | AGA | AGG | CGA | CGC | CGG | CGU |
| Serine | Ser | S | AGC | AGU | UCA | UCC | UCG | UCU |
| Threonine | Thr | T | ACA | ACC | ACG | ACU | | |
| Valine | Val | V | GUA | GUC | GUG | GUU | | |
| Tryptophan | Trp | W | UGG | | | | | |
| Tyrosine | Tyr | Y | UAC | UAU | | | | |

[2676] In making such changes, the hydropathic index of amino acids may be considered. The importance of the hydropathic amino acid index in conferring interactive biologic function on a protein is generally understood in the art (Kyte and Doolittle, 1982, incorporated herein by reference). It is accepted that the relative hydropathic character of the amino acid contributes to the secondary structure of the resultant protein, which in turn defines the interaction of the protein with other molecules, for example, enzymes, substrates, receptors, DNA, antibodies, antigens, and the like. Each amino acid has been assigned a hydropathic index on the basis of its hydrophobicity and charge characteristics (Kyte and Doolittle, 1982). These values are: isoleucine (+4.5); valine (+4.2); leucine (+3.8); phenylalanine (+2.8); cysteine/cystine (+2.5); methionine (+1.9); alanine (+1.8); glycine (−0.4); threonine (−0.7); serine (−0.8); tryptophan (−0.9); tyrosine (−1.3); proline (−1.6); histidine (−3.2); glutamate (−3.5); glutamine (−3.5); aspartate (−3.5); asparagine (−3.5); lysine (−3.9); and arginine (−4.5).

[2677] It is known in the art that certain amino acids may be substituted by other amino acids having a similar hydropathic index or score and still result in a protein with similar biological activity, i.e. still obtain a biological functionally equivalent protein. In making such changes, the substitution of amino acids whose hydropathic indices are within ±2 is preferred, those within ±1 are particularly preferred, and those within ±0.5 are even more particularly preferred. It is also understood in the art that the substitution of like amino acids can be made effectively on the basis of hydrophilicity. U.S. Pat. No. 4,554,101 (specifically incorporated herein by reference in its entirety), states that the greatest local average hydrophilicity of a protein, as governed by the hydrophilicity of its adjacent amino acids, correlates with a biological property of the protein.

[2678] As detailed in U.S. Pat. No. 4,554,101, the following hydrophilicity values have been assigned to amino acid residues: arginine (+3.0); lysine (+3.0); aspartate (+3.0±1); glutamate (+3.0±1); serine (+0.3); asparagine (+0.2); glutamine (+0.2); glycine (0); threonine (−0.4); proline (−0.5±1); alanine (−0.5); histidine (−0.5); cysteine (−1.0); methionine (−1.3); valine (−1.5); leucine (−1.8); isoleucine (−1.8); tyrosine (−2.3); phenylalanine (−2.5); tryptophan (−3.4). It is understood that an amino acid can be substituted for another having a similar hydrophilicity value and still obtain a biologically equivalent, and in particular, an immunologically equivalent protein. In such changes, the substitution of amino acids whose hydrophilicity values are within ±2 is preferred, those within ±1 are particularly preferred, and those within ±0.5 are even more particularly preferred.

[2679] As outlined above, amino acid substitutions are generally therefore based on the relative similarity of the amino acid side-chain substituents, for example, their hydrophobicity, hydrophilicity, charge, size, and the like. Exemplary substitutions that take various of the foregoing characteristics into consideration are well known to those of skill in the art and include: arginine and lysine; glutamate and aspartate; serine and threonine; glutamine and asparagine; and valine, leucine and isoleucine.

[2680] In addition, any polynucleotide may be further modified to increase stability in vivo. Possible modifications include, but are not limited to, the addition of flanking sequences at the 5′ and/or 3′ ends; the use of phosphorothioate or 2′ O-methyl rather than phosphodiesterase linkages in the backbone; and/or the inclusion of nontraditional bases such as inosine, queosine and wybutosine, as well as acetyl- methyl-, thio- and other modified forms of adenine, cytidine, guanine, thymine and uridine.

[2681] Amino acid substitutions may further be made on the basis of similarity in polarity, charge, solubility, hydrophobicity, hydrophilicity and/or the amphipathic nature of the residues. For example, negatively charged amino acids include aspartic acid and glutamic acid; positively charged amino acids include lysine and arginine; and amino acids with uncharged polar head groups having similar hydrophilicity values include leucine, isoleucine and valine; glycine and alanine; asparagine and glutamine; and serine, threonine, phenylalanine and tyrosine. Other groups of amino acids that may represent conservative changes include: (1) ala, pro, gly, glu, asp, gln, asn, ser, thr; (2) cys, ser, tyr, thr; (3) val, ile, leu, met, ala, phe; (4) lys, arg, his; and (5) phe, tyr, trp, his. A variant may also, or alternatively, contain nonconservative changes. In a preferred embodiment, variant polypeptides differ from a native sequence by substitution, deletion or addition of five amino acids or fewer. Variants may also (or alternatively) be modified by, for example, the deletion or addition of amino acids that have minimal influence on the immunogenicity, secondary structure and hydropathic nature of the polypeptide.

[2682] As noted above, polypeptides may comprise a signal (or leader) sequence at the N-terminal end of the protein, which co-translationally or post-translationally directs transfer of the protein. The polypeptide may also be conjugated to a linker or other sequence for ease of synthesis, purification or identification of the polypeptide (e.g., poly-His), or to enhance binding of the polypeptide to a solid support. For example, a polypeptide may be conjugated to an immunoglobulin Fc region.

[2683] When comparing polypeptide sequences, two sequences are said to be “identical” if the sequence of amino acids in the two sequences is the same when aligned for maximum correspondence, as described below. Comparisons between two sequences are typically performed by comparing the sequences over a comparison window to identify and compare local regions of sequence similarity. A “comparison window” as used herein, refers to a segment of at least about 20 contiguous positions, usually 30 to about 75, 40 to about 50, in which a sequence may be compared to a reference sequence of the same number of contiguous positions after the two sequences are optimally aligned.

[2684] Optimal alignment of sequences for comparison may be conducted using the Megalign program in the Lasergene suite of bioinformatics software (DNASTAR, Inc., Madison, Wis.), using default parameters. This program embodies several alignment schemes described in the following references: Dayhoff, M. O. (1978) A model of evolutionary change in proteins—Matrices for detecting distant relationships. In Dayhoff, M. O. (ed.) Atlas of Protein Sequence and Structure, National Biomedical Research Foundation, Washington DC Vol. 5, Suppl. 3, pp. 345-358; Hein J. (1990) Unified Approach to Alignment and Phylogenes pp. 626-645 Methods in Enzymology vol. 183, Academic Press, Inc., San Diego, Calif.; Higgins, D. G. and Sharp, P. M. (1989) CABIOS 5:151-153; Myers, E. W. and Muller W. (1988) CABIOS 4:11-17; Robinson, E. D. (1971) Comb. Theor 11:105; Santou, N. Nes, M. (1987) Mol. Biol. Evol. 4:406-425; Sneath, P. H. A. and Sokal, R. R. (1973) Numerical Taxonomy—the Principles and Practice of Numerical Taxonomy, Freeman Press, San Francisco, Calif.; Wilbur, W. J. and Lipman, D. J. (1983) Proc. Natl. Acad., Sci. USA 80:726-730.

[2685] Alternatively, optimal alignment of sequences for comparison may be conducted by the local identity algorithm of Smith and Waterman (1981) Add. APL. Math 2:482, by the identity alignment algorithm of Needleman and Wunsch (1970) J. Mol. Biol. 48:443, by the search for similarity methods of Pearson and Lipman (1988) Proc. Natl. Acad. Sci. USA 85: 2444, by computerized implementations of these algorithms (GAP, BESTFIT, BLAST, FASTA, and TFASTA in the Wisconsin Genetics Software Package, Genetics Computer Group (GCG), 575 Science Dr., Madison, Wis.), or by inspection.

[2686] One preferred example of algorithms that are suitable for determining percent sequence identity and sequence similarity are the BLAST and BLAST 2.0 algorithms, which are described in Altschul et al. (1977) Nucl. Acids Res. 25:3389-3402 and Altschul et al. (1990) J. Mol. Biol. 215:403-410, respectively. BLAST and BLAST 2.0 can be used, for example with the parameters described herein, to determine percent sequence identity for the polynucleotides and polypeptides of the invention. Software for performing BLAST analyses is publicly available through the National Center for Biotechnology Information. For amino acid sequences, a scoring matrix can be used to calculate the cumulative score. Extension of the word hits in each direction are halted when: the cumulative alignment score falls off by the quantity X from its maximum achieved value; the cumulative score goes to zero or below, due to the accumulation of one or more negative-scoring residue alignments; or the end of either sequence is reached. The BLAST algorithm parameters W, T and X determine the sensitivity and speed of the alignment.

[2687] In one preferred approach, the “percentage of sequence identity” is determined by comparing two optimally aligned sequences over a window of comparison of at least 20 positions, wherein the portion of the polypeptide sequence in the comparison window may comprise additions or deletions (i.e., gaps) of 20 percent or less, usually 5 to 15 percent, or 10 to 12 percent, as compared to the reference sequences (which does not comprise additions or deletions) for optimal alignment of the two sequences. The percentage is calculated by determining the number of positions at which the identical amino acid residue occurs in both sequences to yield the number of matched positions, dividing the number of matched positions by the total number of positions in the reference sequence (i.e., the window size) and multiplying the results by 100 to yield the percentage of sequence identity.

[2688] Within other illustrative embodiments, a polypeptide may be a fusion polypeptide that comprises multiple polypeptides as described herein, or that comprises at least one polypeptide as described herein and an unrelated sequence, such as a known tumor protein. A fusion partner may, for example, assist in providing T helper epitopes (an immunological fusion partner), preferably T helper epitopes recognized by humans, or may assist in expressing the protein (an expression enhancer) at higher yields than the native recombinant protein. Certain preferred fusion partners are both immunological and expression enhancing fusion partners. Other fusion partners may be selected so as to increase the solubility of the polypeptide or to enable the polypeptide to be targeted to desired intracellular compartments. Still further fusion partners include affinity tags, which facilitate purification of the polypeptide.

[2689] Fusion polypeptides may generally be prepared using standard techniques, including chemical conjugation. Preferably, a fusion polypeptide is expressed as a recombinant polypeptide, allowing the production of increased levels, relative to a non-fused polypeptide, in an expression system. Briefly, DNA sequences encoding the polypeptide components may be assembled separately, and ligated into an appropriate expression vector. The 3′ end of the DNA sequence encoding one polypeptide component is ligated, with or without a peptide linker, to the 5′ end of a DNA sequence encoding the second polypeptide component so that the reading frames of the sequences are in phase. This permits translation into a single fusion polypeptide that retains the biological activity of both component polypeptides.

[2690] A peptide linker sequence may be employed to separate the first and second polypeptide components by a distance sufficient to ensure that each polypeptide folds into its secondary and tertiary structures. Such a peptide linker sequence is incorporated into the fusion polypeptide using standard techniques well known in the art. Suitable peptide linker sequences may be chosen based on the following factors: (1) their ability to adopt a flexible extended conformation; (2) their inability to adopt a secondary structure that could interact with functional epitopes on the first and second polypeptides; and (3) the lack of hydrophobic or charged residues that might react with the polypeptide functional epitopes. Preferred peptide linker sequences contain Gly, Asn and Ser residues. Other near neutral amino acids, such as Thr and Ala may also be used in the linker sequence. Amino acid sequences which may be usefully employed as linkers include those disclosed in Maratea et al., Gene 40:39-46, 1985; Murphy et al., Proc. Natl. Acad. Sci. USA 83:8258-8262, 1986; U.S. Pat. No. 4,935,233 and U.S. Pat. No. 4,751,180. The linker sequence may generally be from 1 to about 50 amino acids in length. Linker sequences are not required when the first and second polypeptides have non-essential N-terminal amino acid regions that can be used to separate the functional domains and prevent steric interference.

[2691] The ligated DNA sequences are operably linked to suitable transcriptional or translational regulatory elements. The regulatory elements responsible for expression of DNA are located only 5′ to the DNA sequence encoding the first polypeptides. Similarly, stop codons required to end translation and transcription termination signals are only present 3′ to the DNA sequence encoding the second polypeptide.

[2692] The fusion polypeptide can comprise a polypeptide as described herein together with an unrelated immunogenic protein, such as an immunogenic protein capable of eliciting a recall response. Examples of such proteins include tetanus, tuberculosis and hepatitis proteins (see, for example, Stoute et al. New Engl. J. Med., 336:86-91, 1997).

[2693] In one preferred embodiment, the immunological fusion partner is derived from a Mycobacterium sp., such as a Mycobacterium tuberculosis-derived Ra12 fragment. Ra12 compositions and methods for their use in enhancing the expression and/or immunogenicity of heterologous polynucleotide/polypeptide sequences is described in U.S. Patent Application No. 60/158,585, the disclosure of which is incorporated herein by reference in its entirety. Briefly, Ra12 refers to a polynucleotide region that is a subsequence of a Mycobacterium tuberculosis MTB32A nucleic acid. MTB32A is a serine protease of 32 KD molecular weight encoded by a gene in virulent and avirulent strains of M. tuberculosis. The nucleotide sequence and amino acid sequence of MTB32A have been described (for example, U.S. Patent Application No. 60/158,585; see also, Skeiky et al., Infection and Immun. (1999) 67:3998-4007, incorporated herein by reference). C-terminal fragments of the MTB32A coding sequence express at high levels and remain as a soluble polypeptides throughout the purification process. Moreover, Ra12 may enhance the immunogenicity of heterologous immunogenic polypeptides with which it is fused. One preferred Ra12 fusion polypeptide comprises a 14 KD C-terminal fragment corresponding to amino acid residues 192 to 323 of MTB32A. Other preferred Ra12 polynucleotides generally comprise at least about 15 consecutive nucleotides, at least about 30 nucleotides, at least about 60 nucleotides, at least about 100 nucleotides, at least about 200 nucleotides, or at least about 300 nucleotides that encode a portion of a Ra12 polypeptide. Ra12 polynucleotides may comprise a native sequence (i.e., an endogenous sequence that encodes a Ra12 polypeptide or a portion thereof) or may comprise a variant of such a sequence. Ra12 polynucleotide variants may contain one or more substitutions, additions, deletions and/or insertions such that the biological activity of the encoded fusion polypeptide is not substantially diminished, relative to a fusion polypeptide comprising a native Ra12 polypeptide. Variants preferably exhibit at least about 70% identity, more preferably at least about 80% identity and most preferably at least about 90% identity to a polynucleotide sequence that encodes a native Ra12 polypeptide or a portion thereof.

[2694] Within other preferred embodiments, an immunological fusion partner is derived from protein D, a surface protein of the gram-negative bacterium Haemophilus influenza B (WO 91/18926). Preferably, a protein D derivative comprises approximately the first third of the protein (e.g., the first N-terminal 100-110 amino acids), and a protein D derivative may be lipidated. Within certain preferred embodiments, the first 109 residues of a Lipoprotein D fusion partner is included on the N-terminus to provide the polypeptide with additional exogenous T-cell epitopes and to increase the expression level in E. coli (thus functioning as an expression enhancer). The lipid tail ensures optimal presentation of the antigen to antigen presenting cells. Other fusion partners include the non-structural protein from influenzae virus, NS1 (hemaglutinin). Typically, the N-terminal 81 amino acids are used, although different fragments that include T-helper epitopes may be used.

[2695] In another embodiment, the immunological fusion partner is the protein known as LYTA, or a portion thereof (preferably a C-terminal portion). LYTA is derived from Streptococcus pneumoniae, which synthesizes an N-acetyl-L-alanine amidase known as amidase LYTA (encoded by the LytA gene; Gene 43:265-292, 1986). LYTA is an autolysin that specifically degrades certain bonds in the peptidoglycan backbone. The C-terminal domain of the LYTA protein is responsible for the affinity to the choline or to some choline analogues such as DEAE. This property has been exploited for the development of E. coli C-LYTA expressing plasmids useful for expression of fusion proteins. Purification of hybrid proteins containing the C-LYTA fragment at the amino terminus has been described (see Biotechnology 10:795-798, 1992). Within a preferred embodiment, a repeat portion of LYTA may be incorporated into a fusion polypeptide. A repeat portion is found in the C-terminal region starting at residue 178. A particularly preferred repeat portion incorporates residues 188-305.

[2696] Yet another illustrative embodiment involves fusion polypeptides, and the polynucleotides encoding them, wherein the fusion partner comprises a targeting signal capable of directing a polypeptide to the endosomal/lysosomal compartment, as described in U.S. Pat. No. 5,633,234. An immunogenic polypeptide of the invention, when fused with this targeting signal, will associate more efficiently with MHC class II molecules and thereby provide enhanced in vivo stimulation of CD4⁺ T-cells specific for the polypeptide.

[2697] Polypeptides of the invention are prepared using any of a variety of well known synthetic and/or recombinant techniques, the latter of which are further described below. Polypeptides, portions and other variants generally less than about 150 amino acids can be generated by synthetic means, using techniques well known to those of ordinary skill in the art. In one illustrative example, such polypeptides are synthesized using any of the commercially available solid-phase techniques, such as the Merrifield solid-phase synthesis method, where amino acids are sequentially added to a growing amino acid chain. See Merrifield, J. Am. Chem. Soc. 85:2149-2146, 1963. Equipment for automated synthesis of polypeptides is commercially available from suppliers such as Perkin Elmer/Applied BioSystems Division (Foster City, Calif.), and may be operated according to the manufacturer's instructions.

[2698] In general, polypeptide compositions (including fusion polypeptides) of the invention are isolated. An “isolated” polypeptide is one that is removed from its original environment. For example, a naturally-occurring protein or polypeptide is isolated if it is separated from some or all of the coexisting materials in the natural system. Preferably, such polypeptides are also purified, e.g., are at least about 90% pure, more preferably at least about 95% pure and most preferably at least about 99% pure.

[2699] Polynucleotide Compositions

[2700] The present invention, in other aspects, provides polynucleotide compositions. The terms “DNA” and “polynucleotide” are used essentially interchangeably herein to refer to a DNA molecule that has been isolated free of total genomic DNA of a particular species. “Isolated,” as used herein, means that a polynucleotide is substantially away from other coding sequences, and that the DNA molecule does not contain large portions of unrelated coding DNA, such as large chromosomal fragments or other functional genes or polypeptide coding regions. Of course, this refers to the DNA molecule as originally isolated, and does not exclude genes or coding regions later added to the segment by the hand of man.

[2701] As will be understood by those skilled in the art, the polynucleotide compositions of this invention can include genomic sequences, extra-genomic and plasmid-encoded sequences and smaller engineered gene segments that express, or may be adapted to express, proteins, polypeptides, peptides and the like. Such segments may be naturally isolated, or modified synthetically by the hand of man.

[2702] As will be also recognized by the skilled artisan, polynucleotides of the invention may be single-stranded (coding or antisense) or double-stranded, and may be DNA (genomic, cDNA or synthetic) or RNA molecules. RNA molecules may include HnRNA molecules, which contain introns and correspond to a DNA molecule in a one-to-one manner, and mRNA molecules, which do not contain introns. Additional coding or non-coding sequences may, but need not, be present within a polynucleotide of the present invention, and a polynucleotide may, but need not, be linked to other molecules and/or support materials.

[2703] Polynucleotides may comprise a native sequence (i.e., an endogenous sequence that encodes a polypeptide/protein of the invention or a portion thereof) or may comprise a sequence that encodes a variant or derivative, preferably and immunogenic variant or derivative, of such a sequence.

[2704] Therefore, according to another aspect of the present invention, polynucleotide compositions are provided that comprise some or all of a polynucleotide sequence set forth in any one of SEQ ID NO:1-2589, 2594-2602, and 2604-2605, complements of a polynucleotide sequence set forth in any one of SEQ ID NO:1-2589, 2594-2602, and 2604-2605, and degenerate variants of a polynucleotide sequence set forth in any one of SEQ ID NO:1-2589, 2594-2602, and 2604-2605. In certain preferred embodiments, the polynucleotide sequences set forth herein encode immunogenic polypeptides, as described above.

[2705] In other related embodiments, the present invention provides polynucleotide variants having substantial identity to the sequences disclosed herein in SEQ ID NOs:1-2589, 2594-2602, and 2604-2605, for example those comprising at least 70% sequence identity, preferably at least 75%, 80%, 85%, 90%, 95%, 96%, 97%, 98%, or 99% or higher, sequence identity compared to a polynucleotide sequence of this invention using the methods described herein, (e.g., BLAST analysis using standard parameters, as described below). One skilled in this art will recognize that these values can be appropriately adjusted to determine corresponding identity of proteins encoded by two nucleotide sequences by taking into account codon degeneracy, amino acid similarity, reading frame positioning and the like.

[2706] Typically, polynucleotide variants will contain one or more substitutions, additions, deletions and/or insertions, preferably such that the immunogenicity of the polypeptide encoded by the variant polynucleotide is not substantially diminished relative to a polypeptide encoded by a polynucleotide sequence specifically set forth herein). The term “variants” should also be understood to encompasses homologous genes of xenogenic origin.

[2707] In additional embodiments, the present invention provides polynucleotide fragments comprising various lengths of contiguous stretches of sequence identical to or complementary to one or more of the sequences disclosed herein. For example, polynucleotides are provided by this invention that comprise at least about 10, 15, 20, 30, 40, 50, 75, 100, 150, 200, 300, 400, 500 or 1000 or more contiguous nucleotides of one or more of the sequences disclosed herein as well as all intermediate lengths there between. It will be readily understood that “intermediate lengths”, in this context, means any length between the quoted values, such as 16, 17, 18, 19, etc.; 21, 22, 23, etc.; 30, 31, 32, etc.; 50, 51, 52, 53, etc.; 100, 101, 102, 103, etc.; 150, 151, 152, 153, etc.; including all integers through 200-500; 500-1,000, and the like.

[2708] In another embodiment of the invention, polynucleotide compositions are provided that are capable of hybridizing under moderate to high stringency conditions to a polynucleotide sequence provided herein, or a fragment thereof, or a complementary sequence thereof. Hybridization techniques are well known in the art of molecular biology. For purposes of illustration, suitable moderately stringent conditions for testing the hybridization of a polynucleotide of this invention with other polynucleotides include prewashing in a solution of 5× SSC, 0.5% SDS, 1.0 mM EDTA (pH 8.0); hybridizing at 50° C.-60° C., 5× SSC, overnight; followed by washing twice at 65° C. for 20 minutes with each of 2×, 0.5× and 0.2× SSC containing 0.1% SDS. One skilled in the art will understand that the stringency of hybridization can be readily manipulated, such as by altering the salt content of the hybridization solution and/or the temperature at which the hybridization is performed. For example, in another embodiment, suitable highly stringent hybridization conditions include those described above, with the exception that the temperature of hybridization is increased, e.g., to 60-65° C. or 65-70° C.

[2709] In certain preferred embodiments, the polynucleotides described above, e.g., polynucleotide variants, fragments and hybridizing sequences, encode polypeptides that are immunologically cross-reactive with a polypeptide sequence specifically set forth herein. In other preferred embodiments, such polynucleotides encode polypeptides that have a level of immunogenic activity of at least about 50%, preferably at least about 70%, and more preferably at least about 90% of that for a polypeptide sequence specifically set forth herein.

[2710] The polynucleotides of the present invention, or fragments thereof, regardless of the length of the coding sequence itself, may be combined with other DNA sequences, such as promoters, polyadenylation signals, additional restriction enzyme sites, multiple cloning sites, other coding segments, and the like, such that their overall length may vary considerably. It is therefore contemplated that a nucleic acid fragment of almost any length may be employed, with the total length preferably being limited by the ease of preparation and use in the intended recombinant DNA protocol. For example, illustrative polynucleotide segments with total lengths of about 10,000, about 5000, about 3000, about 2,000, about 1,000, about 500, about 200, about 100, about 50 base pairs in length, and the like, (including all intermediate lengths) are contemplated to be useful in many implementations of this invention.

[2711] When comparing polynucleotide sequences, two sequences are said to be “identical” if the sequence of nucleotides in the two sequences is the same when aligned for maximum correspondence, as described below. Comparisons between two sequences are typically performed by comparing the sequences over a comparison window to identify and compare local regions of sequence similarity. A “comparison window” as used herein, refers to a segment of at least about 20 contiguous positions, usually 30 to about 75, 40 to about 50, in which a sequence may be compared to a reference sequence of the same number of contiguous positions after the two sequences are optimally aligned.

[2712] Optimal alignment of sequences for comparison may be conducted using the Megalign program in the Lasergene suite of bioinformatics software (DNASTAR, Inc., Madison, Wis.), using default parameters. This program embodies several alignment schemes described in the following references: Dayhoff, M. O. (1978) A model of evolutionary change in proteins—Matrices for detecting distant relationships. In Dayhoff, M. O. (ed.) Atlas of Protein Sequence and Structure, National Biomedical Research Foundation, Washington DC Vol. 5, Suppl. 3, pp. 345-358; Hein J. (1990) Unified Approach to Alignment and Phylogenes pp. 626-645 Methods in Enzymology vol. 183, Academic Press, Inc., San Diego, Calif.; Higgins, D. G. and Sharp, P. M. (1989) CABIOS 5:151-153; Myers, E. W. and Muller W. (1988) CABIOS 4:11-17; Robinson, E. D. (1971) Comb. Theor 11:105; Santou, N. Nes, M. (1987) Mol. Biol. Evol. 4:406-425; Sneath, P. H. A. and Sokal, R. R. (1973) Numerical Taxonomy—the Principles and Practice of Numerical Taxonomy, Freeman Press, San Francisco, Calif.; Wilbur, W. J. and Lipman, D. J. (1983) Proc. Natl. Acad., Sci. USA 80:726-730.

[2713] Alternatively, optimal alignment of sequences for comparison may be conducted by the local identity algorithm of Smith and Waterman (1981) Add. APL. Math 2:482, by the identity alignment algorithm of Needleman and Wunsch (1970) J. Mol. Biol. 48:443, by the search for similarity methods of Pearson and Lipman (1988) Proc. Natl. Acad. Sci. USA 85: 2444, by computerized implementations of these algorithms (GAP, BESTFIT, BLAST, FASTA, and TFASTA in the Wisconsin Genetics Software Package, Genetics Computer Group (GCG), 575 Science Dr., Madison, Wis.), or by inspection.

[2714] One preferred example of algorithms that are suitable for determining percent sequence identity and sequence similarity are the BLAST and BLAST 2.0 algorithms, which are described in Altschul et al. (1977) Nucl. Acids Res. 25:3389-3402 and Altschul et al. (1990) J. Mol. Biol. 215:403-410, respectively. BLAST and BLAST 2.0 can be used, for example with the parameters described herein, to determine percent sequence identity for the polynucleotides of the invention. Software for performing BLAST analyses is publicly available through the National Center for Biotechnology Information. In one illustrative example, cumulative scores can be calculated using, for nucleotide sequences, the parameters M (reward score for a pair of matching residues; always >0) and N (penalty score for mismatching residues; always <0). Extension of the word hits in each direction are halted when: the cumulative alignment score falls off by the quantity X from its maximum achieved value; the cumulative score goes to zero or below, due to the accumulation of one or more negative-scoring residue alignments; or the end of either sequence is reached. The BLAST algorithm parameters W, T and X determine the sensitivity and speed of the alignment. The BLASTN program (for nucleotide sequences) uses as defaults a wordlength (W) of 11, and expectation (E) of 10, and the BLOSUM62 scoring matrix (see Henikoff and Henikoff (1989) Proc. Natl. Acad. Sci. USA 89:10915) alignments, (B) of 50, expectation (E) of 10, M=5, N=-−4 and a comparison of both strands.

[2715] Preferably, the “percentage of sequence identity” is determined by comparing two optimally aligned sequences over a window of comparison of at least 20 positions, wherein the portion of the polynucleotide sequence in the comparison window may comprise additions or deletions (i.e., gaps) of 20 percent or less, usually 5 to 15 percent, or 10 to 12 percent, as compared to the reference sequences (which does not comprise additions or deletions) for optimal alignment of the two sequences. The percentage is calculated by determining the number of positions at which the identical nucleic acid bases occurs in both sequences to yield the number of matched positions, dividing the number of matched positions by the total number of positions in the reference sequence (i.e., the window size) and multiplying the results by 100 to yield the percentage of sequence identity.

[2716] It will be appreciated by those of ordinary skill in the art that, as a result of the degeneracy of the genetic code, there are many nucleotide sequences that encode a polypeptide as described herein. Some of these polynucleotides bear minimal homology to the nucleotide sequence of any native gene. Nonetheless, polynucleotides that vary due to differences in codon usage are specifically contemplated by the present invention. Further, alleles of the genes comprising the polynucleotide sequences provided herein are within the scope of the present invention. Alleles are endogenous genes that are altered as a result of one or more mutations, such as deletions, additions and/or substitutions of nucleotides. The resulting mRNA and protein may, but need not, have an altered structure or function. Alleles may be identified using standard techniques (such as hybridization, amplification and/or database sequence comparison).

[2717] Therefore, in another embodiment of the invention, a mutagenesis approach, such as site-specific mutagenesis, is employed for the preparation of immunogenic variants and/or derivatives of the polypeptides described herein. By this approach, specific modifications in a polypeptide sequence can be made through mutagenesis of the underlying polynucleotides that encode them. These techniques provides a straightforward approach to prepare and test sequence variants, for example, incorporating one or more of the foregoing considerations, by introducing one or more nucleotide sequence changes into the polynucleotide.

[2718] Site-specific mutagenesis allows the production of mutants through the use of specific oligonucleotide sequences which encode the DNA sequence of the desired mutation, as well as a sufficient number of adjacent nucleotides, to provide a primer sequence of sufficient size and sequence complexity to form a stable duplex on both sides of the deletion junction being traversed. Mutations may be employed in a selected polynucleotide sequence to improve, alter, decrease, modify, or otherwise change the properties of the polynucleotide itself, and/or alter the properties, activity, composition, stability, or primary sequence of the encoded polypeptide.

[2719] In certain embodiments of the present invention, the inventors contemplate the mutagenesis of the disclosed polynucleotide sequences to alter one or more properties of the encoded polypeptide, such as the immunogenicity of a polypeptide vaccine. The techniques of site-specific mutagenesis are well-known in the art, and are widely used to create variants of both polypeptides and polynucleotides. For example, site-specific mutagenesis is often used to alter a specific portion of a DNA molecule. In such embodiments, a primer comprising typically about 14 to about 25 nucleotides or so in length is employed, with about 5 to about 10 residues on both sides of the junction of the sequence being altered.

[2720] As will be appreciated by those of skill in the art, site-specific mutagenesis techniques have often employed a phage vector that exists in both a single stranded and double stranded form. Typical vectors useful in site-directed mutagenesis include vectors such as the M13 phage. These phage are readily commercially-available and their use is generally well-known to those skilled in the art. Double-stranded plasmids are also routinely employed in site directed mutagenesis that eliminates the step of transferring the gene of interest from a plasmid to a phage.

[2721] In general, site-directed mutagenesis in accordance herewith is performed by first obtaining a single-stranded vector or melting apart of two strands of a double-stranded vector that includes within its sequence a DNA sequence that encodes the desired peptide. An oligonucleotide primer bearing the desired mutated sequence is prepared, generally synthetically. This primer is then annealed with the single-stranded vector, and subjected to DNA polymerizing enzymes such as E. coli polymerase I Klenow fragment, in order to complete the synthesis of the mutation-bearing strand. Thus, a heteroduplex is formed wherein one strand encodes the original non-mutated sequence and the second strand bears the desired mutation. This heteroduplex vector is then used to transform appropriate cells, such as E. coli cells, and clones are selected which include recombinant vectors bearing the mutated sequence arrangement.

[2722] The preparation of sequence variants of the selected peptide-encoding DNA segments using site-directed mutagenesis provides a means of producing potentially useful species and is not meant to be limiting as there are other ways in which sequence variants of peptides and the DNA sequences encoding them may be obtained. For example, recombinant vectors encoding the desired peptide sequence may be treated with mutagenic agents, such as hydroxylamine, to obtain sequence variants. Specific details regarding these methods and protocols are found in the teachings of Maloy et al., 1994; Segal, 1976; Prokop and Bajpai, 1991; Kuby, 1994; and Maniatis et al., 1982, each incorporated herein by reference, for that purpose.

[2723] As used herein, the term “oligonucleotide directed mutagenesis procedure” refers to template-dependent processes and vector-mediated propagation which result in an increase in the concentration of a specific nucleic acid molecule relative to its initial concentration, or in an increase in the concentration of a detectable signal, such as amplification. As used herein, the term “oligonucleotide directed mutagenesis procedure” is intended to refer to a process that involves the template-dependent extension of a primer molecule. The term template dependent process refers to nucleic acid synthesis of an RNA or a DNA molecule wherein the sequence of the newly synthesized strand of nucleic acid is dictated by the well-known rules of complementary base pairing (see, for example, Watson, 1987). Typically, vector mediated methodologies involve the introduction of the nucleic acid fragment into a DNA or RNA vector, the clonal amplification of the vector, and the recovery of the amplified nucleic acid fragment. Examples of such methodologies are provided by U.S. Pat. No. 4,237,224, specifically incorporated herein by reference in its entirety.

[2724] In another approach for the production of polypeptide variants of the present invention, recursive sequence recombination, as described in U.S. Pat. No. 5,837,458, may be employed. In this approach, iterative cycles of recombination and screening or selection are performed to “evolve” individual polynucleotide variants of the invention having, for example, enhanced immunogenic activity.

[2725] In other embodiments of the present invention, the polynucleotide sequences provided herein can be advantageously used as probes or primers for nucleic acid hybridization. As such, it is contemplated that nucleic acid segments that comprise a sequence region of at least about 15 nucleotide long contiguous sequence that has the same sequence as, or is complementary to, a 15 nucleotide long contiguous sequence disclosed herein will find particular utility. Longer contiguous identical or complementary sequences, e.g., those of about 20, 30, 40, 50, 100, 200, 500, 1000 (including all intermediate lengths) and even up to full length sequences will also be of use in certain embodiments.

[2726] The ability of such nucleic acid probes to specifically hybridize to a sequence of interest will enable them to be of use in detecting the presence of complementary sequences in a given sample. However, other uses are also envisioned, such as the use of the sequence information for the preparation of mutant species primers, or primers for use in preparing other genetic constructions.

[2727] Polynucleotide molecules having sequence regions consisting of contiguous nucleotide stretches of 10-14, 15-20, 30, 50, or even of 100-200 nucleotides or so (including intermediate lengths as well), identical or complementary to a polynucleotide sequence disclosed herein, are particularly contemplated as hybridization probes for use in, e.g., Southern and Northern blotting. This would allow a gene product, or fragment thereof, to be analyzed, both in diverse cell types and also in various bacterial cells. The total size of fragment, as well as the size of the complementary stretch(es), will ultimately depend on the intended use or application of the particular nucleic acid segment. Smaller fragments will generally find use in hybridization embodiments, wherein the length of the contiguous complementary region may be varied, such as between about 15 and about 100 nucleotides, but larger contiguous complementarity stretches may be used, according to the length complementary sequences one wishes to detect.

[2728] The use of a hybridization probe of about 15-25 nucleotides in length allows the formation of a duplex molecule that is both stable and selective. Molecules having contiguous complementary sequences over stretches greater than 15 bases in length are generally preferred, though, in order to increase stability and selectivity of the hybrid, and thereby improve the quality and degree of specific hybrid molecules obtained. One will generally prefer to design nucleic acid molecules having gene-complementary stretches of 15 to 25 contiguous nucleotides, or even longer where desired.

[2729] Hybridization probes may be selected from any portion of any of the sequences disclosed herein. All that is required is to review the sequences set forth herein, or to any continuous portion of the sequences, from about 15-25 nucleotides in length up to and including the full length sequence, that one wishes to utilize as a probe or primer. The choice of probe and primer sequences may be governed by various factors. For example, one may wish to employ primers from towards the termini of the total sequence.

[2730] Small polynucleotide segments or fragments may be readily prepared by, for example, directly synthesizing the fragment by chemical means, as is commonly practiced using an automated oligonucleotide synthesizer. Also, fragments may be obtained by application of nucleic acid reproduction technology, such as the PCRTM technology of U.S. Pat. No. 4,683,202 (incorporated herein by reference), by introducing selected sequences into recombinant vectors for recombinant production, and by other recombinant DNA techniques generally known to those of skill in the art of molecular biology.

[2731] The nucleotide sequences of the invention may be used for their ability to selectively form duplex molecules with complementary stretches of the entire gene or gene fragments of interest. Depending on the application envisioned, one will typically desire to employ varying conditions of hybridization to achieve varying degrees of selectivity of probe towards target sequence. For applications requiring high selectivity, one will typically desire to employ relatively stringent conditions to form the hybrids, e.g., one will select relatively low salt and/or high temperature conditions, such as provided by a salt concentration of from about 0.02 M to about 0.15 M salt at temperatures of from about 50° C. to about 70° C. Such selective conditions tolerate little, if any, mismatch between the probe and the template or target strand, and would be particularly suitable for isolating related sequences.

[2732] Of course, for some applications, for example, where one desires to prepare mutants employing a mutant primer strand hybridized to an underlying template, less stringent (reduced stringency) hybridization conditions will typically be needed in order to allow formation of the heteroduplex. In these circumstances, one may desire to employ salt conditions such as those of from about 0.15 M to about 0.9 M salt, at temperatures ranging from about 20° C. to about 55° C. Cross-hybridizing species can thereby be readily identified as positively hybridizing signals with respect to control hybridizations. In any case, it is generally appreciated that conditions can be rendered more stringent by the addition of increasing amounts of formamide, which serves to destabilize the hybrid duplex in the same manner as increased temperature. Thus, hybridization conditions can be readily manipulated, and thus will generally be a method of choice depending on the desired results.

[2733] According to another embodiment of the present invention, polynucleotide compositions comprising antisense oligonucleotides are provided. Antisense oligonucleotides have been demonstrated to be effective and targeted inhibitors of protein synthesis, and, consequently, provide a therapeutic approach by which a disease can be treated by inhibiting the synthesis of proteins that contribute to the disease. The efficacy of antisense oligonucleotides for inhibiting protein synthesis is well established. For example, the synthesis of polygalactauronase and the muscarine type 2 acetylcholine receptor are inhibited by antisense oligonucleotides directed to their respective mRNA sequences (U.S. Pat. No. 5,739,119 and U.S. Pat. No. 5,759,829). Further, examples of antisense inhibition have been demonstrated with the nuclear protein cyclin, the multiple drug resistance gene (MDG1), ICAM-1, E-selectin, STK-1, striatal GABA_{A} receptor and human EGF (Jaskulski et al., Science. 1988 Jun 10;240(4858):1544-6; Vasanthakumar and Ahmed, Cancer Commun. 1989;1(4):225-32; Peris et al., Brain Res Mol Brain Res. 1998 Jun 15;57(2):310-20; U.S. Pat. No. 5,801,154; U.S. Pat. No. 5,789,573; U.S. Pat. No. 5,718,709 and U.S. Pat. No. 5,610,288). Antisense constructs have also been described that inhibit and can be used to treat a variety of abnormal cellular proliferations, e.g. cancer (U.S. Pat. No. 5,747,470; U.S. Pat. No. 5,591,317 and U.S. Pat. No. 5,783,683).

[2734] Therefore, in certain embodiments, the present invention provides oligonucleotide sequences that comprise all, or a portion of, any sequence that is capable of specifically binding to polynucleotide sequence described herein, or a complement thereof. In one embodiment, the antisense oligonuclotides comprise DNA or derivatives thereof. In another embodiment, the oligonucleotides comprise RNA or derivatives thereof. In a third embodiment, the oligonucleotides are modified DNAs comprising a phosphorothioated modified backbone. In a fourth embodiment, the oligonucleotide sequences comprise peptide nucleic acids or derivatives thereof. In each case, preferred compositions comprise a sequence region that is complementary, and more preferably substantially-complementary, and even more preferably, completely complementary to one or more portions of polynucleotides disclosed herein. Selection of antisense compositions specific for a given gene sequence is based upon analysis of the chosen target sequence and determination of secondary structure, Tₘ, binding energy, and relative stability. Antisense compositions may be selected based upon their relative inability to form dimers, hairpins, or other secondary structures that would reduce or prohibit specific binding to the target mRNA in a host cell. Highly preferred target regions of the mRNA, are those which are at or near the AUG translation initiation codon, and those sequences which are substantially complementary to 5′ regions of the mRNA. These secondary structure analyses and target site selection considerations can be performed, for example, using v.4 of the OLIGO primer analysis software and/or the BLASTN 2.0.5 algorithm software (Altschul et al., Nucleic Acids Res. 1997, 25(17):3389-402).

[2735] The use of an antisense delivery method employing a short peptide vector, termed MPG (27 residues), is also contemplated. The MPG peptide contains a hydrophobic domain derived from the fusion sequence of HIV gp41 and a hydrophilic domain from the nuclear localization sequence of SV40 T-antigen (Morris et al., Nucleic Acids Res. 1997 Jul 15;25(14):2730-6). It has been demonstrated that several molecules of the MPG peptide coat the antisense oligonucleotides and can be delivered into cultured mammalian cells in less than 1 hour with relatively high efficiency (90%). Further, the interaction with MPG strongly increases both the stability of the oligonucleotide to nuclease and the ability to cross the plasma membrane.

[2736] According to another embodiment of the invention, the polynucleotide compositions described herein are used in the design and preparation of ribozyme molecules for inhibiting expression of the tumor polypeptides and proteins of the present invention in tumor cells. Ribozymes are RNA-protein complexes that cleave nucleic acids in a site-specific fashion. Ribozymes have specific catalytic domains that possess endonuclease activity (Kim and Cech, Proc Natl Acad Sci U S A. 1987 Dec;84(24):8788-92; Forster and Symons, Cell. 1987 Apr 24;49(2):211-20). For example, a large number of ribozymes accelerate phosphoester transfer reactions with a high degree of specificity, often cleaving only one of several phosphoesters in an oligonucleotide substrate (Cech et al., Cell. 1981 Dec;27(3 Pt 2):487-96; Michel and Westhof, J Mol Biol. 1990 Dec 5;216(3):585-610; Reinhold-Hurek and Shub, Nature. 1992 May 14;357(6374):173-6). This specificity has been attributed to the requirement that the substrate bind via specific base-pairing interactions to the internal guide sequence (“IGS”) of the ribozyme prior to chemical reaction.

[2737] Six basic varieties of naturally-occurring enzymatic RNAs are known presently. Each can catalyze the hydrolysis of RNA phosphodiester bonds in trans (and thus can cleave other RNA molecules) under physiological conditions. In general, enzymatic nucleic acids act by first binding to a target RNA. Such binding occurs through the target binding portion of a enzymatic nucleic acid which is held in close proximity to an enzymatic portion of the molecule that acts to cleave the target RNA. Thus, the enzymatic nucleic acid first recognizes and then binds a target RNA through complementary base-pairing, and once bound to the correct site, acts enzymatically to cut the target RNA. Strategic cleavage of such a target RNA will destroy its ability to direct synthesis of an encoded protein. After an enzymatic nucleic acid has bound and cleaved its RNA target, it is released from that RNA to search for another target and can repeatedly bind and cleave new targets.

[2738] The enzymatic nature of a ribozyme is advantageous over many technologies, such as antisense technology (where a nucleic acid molecule simply binds to a nucleic acid target to block its translation) since the concentration of ribozyme necessary to affect a therapeutic treatment is lower than that of an antisense oligonucleotide. This advantage reflects the ability of the ribozyme to act enzymatically. Thus, a single ribozyme molecule is able to cleave many molecules of target RNA. In addition, the ribozyme is a highly specific inhibitor, with the specificity of inhibition depending not only on the base pairing mechanism of binding to the target RNA, but also on the mechanism of target RNA cleavage. Single mismatches, or base-substitutions, near the site of cleavage can completely eliminate catalytic activity of a ribozyme. Similar mismatches in antisense molecules do not prevent their action (Woolf et al., Proc Natl Acad Sci U S A. 1992 Aug 15;89(16):7305-9). Thus, the specificity of action of a ribozyme is greater than that of an antisense oligonucleotide binding the same RNA site.

[2739] The enzymatic nucleic acid molecule may be formed in a hammerhead, hairpin, a hepatitis δ virus, group I intron or RNaseP RNA (in association with an RNA guide sequence) or Neurospora VS RNA motif. Examples of hammerhead motifs are described by Rossi et al. Nucleic Acids Res. 1992 Sep 11;20(17):4559-65. Examples of hairpin motifs are described by Hampel et al. (Eur. Pat. Appl. Publ. No. EP 0360257), Hampel and Tritz, Biochemistry 1989 Jun 13;28(12):4929-33; Hampel et al., Nucleic Acids Res. 1990 Jan 25;18(2):299-304 and U.S. Pat. No. 5,631,359. An example of the hepatitis δ virus motif is described by Perrotta and Been, Biochemistry. 1992 Dec 1;31(47):11843-52; an example of the RNaseP motif is described by Guerrier-Takada et al., Cell. 1983 Dec;35(3 Pt 2):849-57; Neurospora VS RNA ribozyme motif is described by Collins (Saville and Collins, Cell. 1990 May 18;61(4):685-96; Saville and Collins, Proc Natl Acad Sci U S A. 1991 Oct 1;88(19):8826-30; Collins and Olive, Biochemistry. 1993 Mar 23;32(11):2795-9); and an example of the Group I intron is described in (U.S. Pat. No. 4,987,071). All that is important in an enzymatic nucleic acid molecule of this invention is that it has a specific substrate binding site which is complementary to one or more of the target gene RNA regions, and that it have nucleotide sequences within or surrounding that substrate binding site which impart an RNA cleaving activity to the molecule. Thus the ribozyme constructs need not be limited to specific motifs mentioned herein.

[2740] Ribozymes may be designed as described in Int. Pat. Appl. Publ. No. WO 93/23569 and Int. Pat. Appl. Publ. No. WO 94/02595, each specifically incorporated herein by reference) and synthesized to be tested in vitro and in vivo, as described. Such ribozymes can also be optimized for delivery. While specific examples are provided, those in the art will recognize that equivalent RNA targets in other species can be utilized when necessary.

[2741] Ribozyme activity can be optimized by altering the length of the ribozyme binding arms, or chemically synthesizing ribozymes with modifications that prevent their degradation by serum ribonucleases (see e.g., Int. Pat. Appl. Publ. No. WO 92/07065; Int. Pat. Appl. Publ. No. WO 93/15187; Int. Pat. Appl. Publ. No. WO 91/03162; Eur. Pat. Appl. Publ. No. 92110298.4; U.S. Pat. No. 5,334,711; and Int. Pat. Appl. Publ. No. WO 94/13688, which describe various chemical modifications that can be made to the sugar moieties of enzymatic RNA molecules), modifications which enhance their efficacy in cells, and removal of stem II bases to shorten RNA synthesis times and reduce chemical requirements.

[2742] Sullivan et al. (Int. Pat. Appl. Publ. No. WO 94/02595) describes the general methods for delivery of enzymatic RNA molecules. Ribozymes may be administered to cells by a variety of methods known to those familiar to the art, including, but not restricted to, encapsulation in liposomes, by iontophoresis, or by incorporation into other vehicles, such as hydrogels, cyclodextrins, biodegradable nanocapsules, and bioadhesive microspheres. For some indications, ribozymes may be directly delivered ex vivo to cells or tissues with or without the aforementioned vehicles. Alternatively, the RNA/vehicle combination may be locally delivered by direct inhalation, by direct injection or by use of a catheter, infusion pump or stent. Other routes of delivery include, but are not limited to, intravascular, intramuscular, subcutaneous or joint injection, aerosol inhalation, oral (tablet or pill form), topical, systemic, ocular, intraperitoneal and/or intrathecal delivery. More detailed descriptions of ribozyme delivery and administration are provided in Int. Pat. Appl. Publ. No. WO 94/02595 and Int. Pat. Appl. Publ. No. WO 93/23569, each specifically incorporated herein by reference.

[2743] Another means of accumulating high concentrations of a ribozyme(s) within cells is to incorporate the ribozyme-encoding sequences into a DNA expression vector. Transcription of the ribozyme sequences are driven from a promoter for eukaryotic RNA polymerase I (pol I), RNA polymerase II (pol II), or RNA polymerase III (pol III). Transcripts from pol II or pol III promoters will be expressed at high levels in all cells; the levels of a given pol II promoter in a given cell type will depend on the nature of the gene regulatory sequences (enhancers, silencers, etc.) present nearby. Prokaryotic RNA polymerase promoters may also be used, providing that the prokaryotic RNA polymerase enzyme is expressed in the appropriate cells Ribozymes expressed from such promoters have been shown to function in mammalian cells. Such transcription units can be incorporated into a variety of vectors for introduction into mammalian cells, including but not restricted to, plasmid DNA vectors, viral DNA vectors (such as adenovirus or adeno-associated vectors), or viral RNA vectors (such as retroviral, semliki forest virus, sindbis virus vectors).

[2744] In another embodiment of the invention, peptide nucleic acids (PNAs) compositions are provided. PNA is a DNA mimic in which the nucleobases are attached to a pseudopeptide backbone (Good and Nielsen, Antisense Nucleic Acid Drug Dev. 1997 7(4) 431-37). PNA is able to be utilized in a number methods that traditionally have used RNA or DNA. Often PNA sequences perform better in techniques than the corresponding RNA or DNA sequences and have utilities that are not inherent to RNA or DNA. A review of PNA including methods of making, characteristics of, and methods of using, is provided by Corey (Trends Biotechnol 1997 Jun;15(6):224-9). As such, in certain embodiments, one may prepare PNA sequences that are complementary to one or more portions of the ACE mRNA sequence, and such PNA compositions may be used to regulate, alter, decrease, or reduce the translation of ACE-specific mRNA, and thereby alter the level of ACE activity in a host cell to which such PNA compositions have been administered.

[2745] PNAs have 2-aminoethyl-glycine linkages replacing the normal phosphodiester backbone of DNA (Nielsen et al., Science 1991 Dec 6;254(5037):1497-500; Hanvey et al., Science. 1992 Nov 27;258(5087):1481-5; Hyrup and Nielsen, Bioorg Med Chem. 1996 Jan;4(l):5-23). This chemistry has three important consequences: firstly, in contrast to DNA or phosphorothioate oligonucleotides, PNAs are neutral molecules; secondly, PNAs are achiral, which avoids the need to develop a stereoselective synthesis; and thirdly, PNA synthesis uses standard Boc or Fmoc protocols for solid-phase peptide synthesis, although other methods, including a modified Merrifield method, have been used.

[2746] PNA monomers or ready-made oligomers are commercially available from PerSeptive Biosystems (Framingham, Mass.). PNA syntheses by either Boc or Fmoc protocols are straightforward using manual or automated protocols (Norton et al., Bioorg Med Chem. 1995 Apr;3(4):437-45). The manual protocol lends itself to the production of chemically modified PNAs or the simultaneous synthesis of families of closely related PNAs.

[2747] As with peptide synthesis, the success of a particular PNA synthesis will depend on the properties of the chosen sequence. For example, while in theory PNAs can incorporate any combination of nucleotide bases, the presence of adjacent purines can lead to deletions of one or more residues in the product. In expectation of this difficulty, it is suggested that, in producing PNAs with adjacent purines, one should repeat the coupling of residues likely to be added inefficiently. This should be followed by the purification of PNAs by reverse-phase high-pressure liquid chromatography, providing yields and purity of product similar to those observed during the synthesis of peptides.

[2748] Modifications of PNAs for a given application may be accomplished by coupling amino acids during solid-phase synthesis or by attaching compounds that contain a carboxylic acid group to the exposed N-terminal amine. Alternatively, PNAs can be modified after synthesis by coupling to an introduced lysine or cysteine. The ease with which PNAs can be modified facilitates optimization for better solubility or for specific functional requirements. Once synthesized, the identity of PNAs and their derivatives can be confirmed by mass spectrometry. Several studies have made and utilized modifications of PNAs (for example, Norton et al., Bioorg Med Chem. 1995 Apr;3(4):437-45; Petersen et al., J Pept Sci. 1995 May-Jun;1(3):175-83; Orum et al., Biotechniques. 1995 Sep;19(3):472-80; Footer et al., Biochemistry. 1996 Aug 20;35(33):10673-9; Griffith et al., Nucleic Acids Res. 1995 Aug 1 1;23(15):3003-8; Pardridge et al., Proc Natl Acad Sci U S A. 1995 Jun 6;92(12):5592-6; Boffa et al., Proc Natl Acad Sci U S A. 1995 Mar 14;92(6):1901-5; Gambacorti-Passerini et al., Blood. 1996 Aug 15;88(4):1411-7; Armitage et al., Proc Natl Acad Sci U S A. 1997 Nov 11;94(23):12320-5; Seeger et al., Biotechniques. 1997 Sep;23(3):512-7). U.S. Pat. No. 5,700,922 discusses PNA-DNA-PNA chimeric molecules and their uses in diagnostics, modulating protein in organisms, and treatment of conditions susceptible to therapeutics.

[2749] Methods of characterizing the antisense binding properties of PNAs are discussed in Rose (Anal Chem. 1993 Dec 15;65(24):3545-9) and Jensen et al. (Biochemistry. 1997 Apr 22;36(16):5072-7). Rose uses capillary gel electrophoresis to determine binding of PNAs to their complementary oligonucleotide, measuring the relative binding kinetics and stoichiometry. Similar types of measurements were made by Jensen et al. using BIAcore™ technology.

[2750] Other applications of PNAs that have been described and will be apparent to the skilled artisan include use in DNA strand invasion, antisense inhibition, mutational analysis, enhancers of transcription, nucleic acid purification, isolation of transcriptionally active genes, blocking of transcription factor binding, genome cleavage, biosensors, in situ hybridization, and the like.

[2751] Polynucleotide Identification, Characterization and Expression

[2752] Polynucleotides compositions of the present invention may be identified, prepared and/or manipulated using any of a variety of well established techniques (see generally, Sambrook et al., Molecular Cloning: A Laboratory Manual, Cold Spring Harbor Laboratories, Cold Spring Harbor, N.Y., 1989, and other like references). For example, a polynucleotide may be identified, as described in more detail below, by screening a microarray of cDNAs for tumor-associated expression (i.e., expression that is at least two fold greater in a tumor than in normal tissue, as determined using a representative assay provided herein). Such screens may be performed, for example, using the microarray technology of Affymetrix, Inc. (Santa Clara, Calif.) according to the manufacturer's instructions (and essentially as described by Schena et al., Proc. Natl. Acad. Sci. USA 93:10614-10619, 1996 and Heller et al., Proc. Natl. Acad. Sci. USA 94:2150-2155, 1997). Alternatively, polynucleotides may be amplified from cDNA prepared from cells expressing the proteins described herein, such as tumor cells.

[2753] Many template dependent processes are available to amplify a target sequences of interest present in a sample. One of the best known amplification methods is the polymerase chain reaction (PCR™) which is described in detail in U.S. Pat. Nos. 4,683,195, 4,683,202 and 4,800,159, each of which is incorporated herein by reference in its entirety. Briefly, in PCR™, two primer sequences are prepared which are complementary to regions on opposite complementary strands of the target sequence. An excess of deoxynucleoside triphosphates is added to a reaction mixture along with a DNA polymerase (e.g., Taq polymerase). If the target sequence is present in a sample, the primers will bind to the target and the polymerase will cause the primers to be extended along the target sequence by adding on nucleotides. By raising and lowering the temperature of the reaction mixture, the extended primers will dissociate from the target to form reaction products, excess primers will bind to the target and to the reaction product and the process is repeated. Preferably reverse transcription and PCR™ amplification procedure may be performed in order to quantify the amount of mRNA amplified. Polymerase chain reaction methodologies are well known in the art.

[2754] Any of a number of other template dependent processes, many of which are variations of the PCR™ amplification technique, are readily known and available in the art. Illustratively, some such methods include the ligase chain reaction (referred to as LCR), described, for example, in Eur. Pat. Appl. Publ. No. 320,308 and U.S. Pat. No. 4,883,750; Qbeta Replicase, described in PCT Intl. Pat. Appl. Publ. No. PCT/US87/00880; Strand Displacement Amplification (SDA) and Repair Chain Reaction (RCR). Still other amplification methods are described in Great Britain Pat. Appl. No. 2 202 328, and in PCT Intl. Pat. Appl. Publ. No. PCT/US89/01025. Other nucleic acid amplification procedures include transcription-based amplification systems (TAS) (PCT Intl. Pat. Appl. Publ. No. WO 88/10315), including nucleic acid sequence based amplification (NASBA) and 3SR. Eur. Pat. Appl. Publ. No. 329,822 describes a nucleic acid amplification process involving cyclically synthesizing single-stranded RNA (“ssRNA”), ssDNA, and double-stranded DNA (dsDNA). PCT Intl. Pat. Appl. Publ. No. WO 89/06700 describes a nucleic acid sequence amplification scheme based on the hybridization of a promoter/primer sequence to a target single-stranded DNA (“ssDNA”) followed by transcription of many RNA copies of the sequence. Other amplification methods such as “RACE” (Frohman, 1990), and “one-sided PCR” (Ohara, 1989) are also well-known to those of skill in the art.

[2755] An amplified portion of a polynucleotide of the present invention may be used to isolate a full length gene from a suitable library (e.g., a tumor cDNA library) using well known techniques. Within such techniques, a library (cDNA or genomic) is screened using one or more polynucleotide probes or primers suitable for amplification. Preferably, a library is size-selected to include larger molecules. Random primed libraries may also be preferred for identifying 5′ and upstream regions of genes. Genomic libraries are preferred for obtaining introns and extending 5′ sequences.

[2756] For hybridization techniques, a partial sequence may be labeled (e.g., by nick-translation or end-labeling with ³²p) using well known techniques. A bacterial or bacteriophage library is then generally screened by hybridizing filters containing denatured bacterial colonies (or lawns containing phage plaques) with the labeled probe (see Sambrook et al., Molecular Cloning: A Laboratory Manual, Cold Spring Harbor Laboratories, Cold Spring Harbor, N.Y., 1989). Hybridizing colonies or plaques are selected and expanded, and the DNA is isolated for further analysis. cDNA clones may be analyzed to determine the amount of additional sequence by, for example, PCR using a primer from the partial sequence and a primer from the vector. Restriction maps and partial sequences may be generated to identify one or more overlapping clones. The complete sequence may then be determined using standard techniques, which may involve generating a series of deletion clones. The resulting overlapping sequences can then assembled into a single contiguous sequence. A full length cDNA molecule can be generated by ligating suitable fragments, using well known techniques.

[2757] Alternatively, amplification techniques, such as those described above, can be useful for obtaining a fall length coding sequence from a partial cDNA sequence. One such amplification technique is inverse PCR (see Triglia et al., Nucl. Acids Res. 16:8186, 1988), which uses restriction enzymes to generate a fragment in the known region of the gene. The fragment is then circularized by intramolecular ligation and used as a template for PCR with divergent primers derived from the known region. Within an alternative approach, sequences adjacent to a partial sequence may be retrieved by amplification with a primer to a linker sequence and a primer specific to a known region. The amplified sequences are typically subjected to a second round of amplification with the same linker primer and a second primer specific to the known region. A variation on this procedure, which employs two primers that initiate extension in opposite directions from the known sequence, is described in WO 96/38591. Another such technique is known as “rapid amplification of cDNA ends” or RACE. This technique involves the use of an internal primer and an external primer, which hybridizes to a polyA region or vector sequence, to identify sequences that are 5′ and 3′ of a known sequence. Additional techniques include capture PCR (Lagerstrom et al., PCR Methods Applic. 1:111-19, 1991) and walking PCR (Parker et al., Nucl. Acids. Res. 19:3055-60, 1991). Other methods employing amplification may also be employed to obtain a full length cDNA sequence.

[2758] In certain instances, it is possible to obtain a full length cDNA sequence by analysis of sequences provided in an expressed sequence tag (EST) database, such as that available from GenBank. Searches for overlapping ESTs may generally be performed using well known programs (e.g., NCBI BLAST searches), and such ESTs may be used to generate a contiguous full length sequence. Full length DNA sequences may also be obtained by analysis of genomic fragments.

[2759] In other embodiments of the invention, polynucleotide sequences or fragments thereof which encode polypeptides of the invention, or fusion proteins or functional equivalents thereof, may be used in recombinant DNA molecules to direct expression of a polypeptide in appropriate host cells. Due to the inherent degeneracy of the genetic code, other DNA sequences that encode substantially the same or a functionally equivalent amino acid sequence may be produced and these sequences may be used to clone and express a given polypeptide.

[2760] As will be understood by those of skill in the art, it may be advantageous in some instances to produce polypeptide-encoding nucleotide sequences possessing non-naturally occurring codons. For example, codons preferred by a particular prokaryotic or eukaryotic host can be selected to increase the rate of protein expression or to produce a recombinant RNA transcript having desirable properties, such as a half-life which is longer than that of a transcript generated from the naturally occurring sequence.

[2761] Moreover, the polynucleotide sequences of the present invention can be engineered using methods generally known in the art in order to alter polypeptide encoding sequences for a variety of reasons, including but not limited to, alterations which modify the cloning, processing, and/or expression of the gene product. For example, DNA shuffling by random fragmentation and PCR reassembly of gene fragments and synthetic oligonucleotides may be used to engineer the nucleotide sequences. In addition, site-directed mutagenesis may be used to insert new restriction sites, alter glycosylation patterns, change codon preference, produce splice variants, or introduce mutations, and so forth.

[2762] In another embodiment of the invention, natural, modified, or recombinant nucleic acid sequences may be ligated to a heterologous sequence to encode a fusion protein. For example, to screen peptide libraries for inhibitors of polypeptide activity, it may be useful to encode a chimeric protein that can be recognized by a commercially available antibody. A fusion protein may also be engineered to contain a cleavage site located between the polypeptide-encoding sequence and the heterologous protein sequence, so that the polypeptide may be cleaved and purified away from the heterologous moiety.

[2763] Sequences encoding a desired polypeptide may be synthesized, in whole or in part, using chemical methods well known in the art (see Caruthers, M. H. et al. (1980) Nucl. Acids Res. Symp. Ser. 215-223, Horn, T. et al. (1980) Nucl. Acids Res. Symp. Ser. 225-232). Alternatively, the protein itself may be produced using chemical methods to synthesize the amino acid sequence of a polypeptide, or a portion thereof. For example, peptide synthesis can be performed using various solid-phase techniques (Roberge, J. Y. et al. (1995) Science 269:202-204) and automated synthesis may be achieved, for example, using the ABI 431 A Peptide Synthesizer (Perkin Elmer, Palo Alto, Calif.).

[2764] A newly synthesized peptide may be substantially purified by preparative high performance liquid chromatography (e.g., Creighton, T. (1983) Proteins, Structures and Molecular Principles, W H Freeman and Co., New York, N.Y.) or other comparable techniques available in the art. The composition of the synthetic peptides may be confirmed by amino acid analysis or sequencing (e.g., the Edman degradation procedure). Additionally, the amino acid sequence of a polypeptide, or any part thereof, may be altered during direct synthesis and/or combined using chemical methods with sequences from other proteins, or any part thereof, to produce a variant polypeptide.

[2765] In order to express a desired polypeptide, the nucleotide sequences encoding the polypeptide, or functional equivalents, may be inserted into appropriate expression vector, i.e., a vector which contains the necessary elements for the transcription and translation of the inserted coding sequence. Methods which are well known to those skilled in the art may be used to construct expression vectors containing sequences encoding a polypeptide of interest and appropriate transcriptional and translational control elements. These methods include in vitro recombinant DNA techniques, synthetic techniques, and in vivo genetic recombination. Such techniques are described, for example, in Sambrook, J. et al. (1989) Molecular Cloning, A Laboratory Manual, Cold Spring Harbor Press, Plainview, N.Y., and Ausubel, F. M. et al. (1989) Current Protocols in Molecular Biology, John Wiley & Sons, New York. N.Y.

[2766] A variety of expression vector/host systems may be utilized to contain and express polynucleotide sequences. These include, but are not limited to, microorganisms such as bacteria transformed with recombinant bacteriophage, plasmid, or cosmid DNA expression vectors; yeast transformed with yeast expression vectors; insect cell systems infected with virus expression vectors (e.g., baculovirus); plant cell systems transformed with virus expression vectors (e.g., cauliflower mosaic virus, CaMV; tobacco mosaic virus, TMV) or with bacterial expression vectors (e.g., Ti or pBR322 plasmids); or animal cell systems.

[2767] The “control elements” or “regulatory sequences” present in an expression vector are those non-translated regions of the vector—enhancers, promoters, 5′ and 3′ untranslated regions—which interact with host cellular proteins to carry out transcription and translation. Such elements may vary in their strength and specificity. Depending on the vector system and host utilized, any number of suitable transcription and translation elements, including constitutive and inducible promoters, may be used. For example, when cloning in bacterial systems, inducible promoters such as the hybrid lacZ promoter of the PBLUESCRIPT phagemid (Stratagene, La Jolla, Calif.) or PSPORT1 plasmid (Gibco BRL, Gaithersburg, Md.) and the like may be used. In mammalian cell systems, promoters from mammalian genes or from mammalian viruses are generally preferred. If it is necessary to generate a cell line that contains multiple copies of the sequence encoding a polypeptide, vectors based on SV40 or EBV may be advantageously used with an appropriate selectable marker.

[2768] In bacterial systems, any of a number of expression vectors may be selected depending upon the use intended for the expressed polypeptide. For example, when large quantities are needed, for example for the induction of antibodies, vectors which direct high level expression of fusion proteins that are readily purified may be used. Such vectors include, but are not limited to, the multifunctional E. Coli cloning and expression vectors such as BLUESCRIPT (Stratagene), in which the sequence encoding the polypeptide of interest may be ligated into the vector in frame with sequences for the amino-terminal Met and the subsequent 7 residues of beta.-galactosidase so that a hybrid protein is produced; pIN vectors (Van Heeke, G. and S. M. Schuster (1989) J. Biol. Chem. 264:5503-5509); and the like. pGEX Vectors (Promega, Madison, Wis.) may also be used to express foreign polypeptides as fusion proteins with glutathione S-transferase (GST). In general, such fusion proteins are soluble and can easily be purified from lysed cells by adsorption to glutathione-agarose beads followed by elution in the presence of free glutathione. Proteins made in such systems may be designed to include heparin, thrombin, or factor XA protease cleavage sites so that the cloned polypeptide of interest can be released from the GST moiety at will.

[2769] In the yeast, Saccharomyces cerevisiae, a number of vectors containing constitutive or inducible promoters such as alpha factor, alcohol oxidase, and PGH may be used. For reviews, see Ausubel et al. (supra) and Grant et al. (1987) Methods Enzymol. 153:516-544.

[2770] In cases where plant expression vectors are used, the expression of sequences encoding polypeptides may be driven by any of a number of promoters. For example, viral promoters such as the 35S and 19S promoters of CaMV may be used alone or in combination with the omega leader sequence from TMV (Takamatsu, N. (1987) EMBO J. 6:307-31 1. Alternatively, plant promoters such as the small subunit of RUBISCO or heat shock promoters may be used (Coruzzi, G. et al. (1984) EMBO J. 3:1671-1680; Broglie, R. et al. (1984) Science 224:838-843; and Winter, J. et al. (1991) Results Probl. Cell Differ. 17:85-105). These constructs can be introduced into plant cells by direct DNA transformation or pathogen-mediated transfection. Such techniques are described in a number of generally available reviews (see, for example, Hobbs, S. or Murry, L. E. in McGraw Hill Yearbook of Science and Technology (1992) McGraw Hill, New York, N.Y.; pp. 191-196).

[2771] An insect system may also be used to express a polypeptide of interest. For example, in one such system, Autographa californica nuclear polyhedrosis virus (AcNPV) is used as a vector to express foreign genes in Spodoptera frugiperda cells or in Trichoplusia larvae. The sequences encoding the polypeptide may be cloned into a non-essential region of the virus, such as the polyhedrin gene, and placed under control of the polyhedrin promoter. Successful insertion of the polypeptide-encoding sequence will render the polyhedrin gene inactive and produce recombinant virus lacking coat protein. The recombinant viruses may then be used to infect, for example, S. frugiperda cells or Trichoplusia larvae in which the polypeptide of interest may be expressed (Engelhard, E. K. et al. (1994) Proc. Natl. Acad. Sci. 91 :3224-3227).

[2772] In mammalian host cells, a number of viral-based expression systems are generally available. For example, in cases where an adenovirus is used as an expression vector, sequences encoding a polypeptide of interest may be ligated into an adenovirus transcription/translation complex consisting of the late promoter and tripartite leader sequence. Insertion in a non-essential E1 or E3 region of the viral genome may be used to obtain a viable virus which is capable of expressing the polypeptide in infected host cells (Logan, J. and Shenk, T. (1984) Proc. Natl. Acad. Sci. 81:3655-3659). In addition, transcription enhancers, such as the Rous sarcoma virus (RSV) enhancer, may be used to increase expression in mammalian host cells.

[2773] Specific initiation signals may also be used to achieve more efficient translation of sequences encoding a polypeptide of interest. Such signals include the ATG initiation codon and adjacent sequences. In cases where sequences encoding the polypeptide, its initiation codon, and upstream sequences are inserted into the appropriate expression vector, no additional transcriptional or translational control signals may be needed. However, in cases where only coding sequence, or a portion thereof, is inserted, exogenous translational control signals including the ATG initiation codon should be provided. Furthermore, the initiation codon should be in the correct reading frame to ensure translation of the entire insert. Exogenous translational elements and initiation codons may be of various origins, both natural and synthetic. The efficiency of expression may be enhanced by the inclusion of enhancers which are appropriate for the particular cell system which is used, such as those described in the literature (Scharf, D. et al. (1994) Results Probl. Cell Differ. 20:125-162).

[2774] In addition, a host cell strain may be chosen for its ability to modulate the expression of the inserted sequences or to process the expressed protein in the desired fashion. Such modifications of the polypeptide include, but are not limited to, acetylation, carboxylation. glycosylation, phosphorylation, lipidation, and acylation. Post-translational processing which cleaves a “prepro” form of the protein may also be used to facilitate correct insertion, folding and/or function. Different host cells such as CHO, COS, HeLa, MDCK, HEK293, and W138, which have specific cellular machinery and characteristic mechanisms for such post-translational activities, may be chosen to ensure the correct modification and processing of the foreign protein.

[2775] For long-term, high-yield production of recombinant proteins, stable expression is generally preferred. For example, cell lines which stably express a polynucleotide of interest may be transformed using expression vectors which may contain viral origins of replication and/or endogenous expression elements and a selectable marker gene on the same or on a separate vector. Following the introduction of the vector, cells may be allowed to grow for 1-2 days in an enriched media before they are switched to selective media. The purpose of the selectable marker is to confer resistance to selection, and its presence allows growth and recovery of cells which successfully express the introduced sequences. Resistant clones of stably transformed cells may be proliferated using tissue culture techniques appropriate to the cell type.

[2776] Any number of selection systems may be used to recover transformed cell lines. These include, but are not limited to, the herpes simplex virus thymidine kinase (Wigler, M. et al. (1977) Cell 11:223-32) and adenine phosphoribosyltransferase (Lowy, I. et al. (1990) Cell 22:817-23) genes which can be employed in tk.sup.- or aprt.sup.-cells, respectively. Also, antimetabolite, antibiotic or herbicide resistance can be used as the basis for selection; for example, dhfr which confers resistance to methotrexate (Wigler, M. et al. (1980) Proc. Natl. Acad. Sci. 77:3567-70); npt, which confers resistance to the aminoglycosides, neomycin and G-418 (Colbere-Garapin, F. et al (1981) J. Mol. Biol. 150:1-14); and als or pat, which confer resistance to chlorsulfuron and phosphinotricin acetyltransferase, respectively (Murry, supra). Additional selectable genes have been described, for example, trpB, which allows cells to utilize indole in place of tryptophan, or hisD, which allows cells to utilize histinol in place of histidine (Hartman, S. C. and R. C. Mulligan (1988) Proc. Natl. Acad. Sci. 85:8047-51). The use of visible markers has gained popularity with such markers as anthocyanins, beta-glucuronidase and its substrate GUS, and luciferase and its substrate luciferin, being widely used not only to identify transformants, but also to quantify the amount of transient or stable protein expression attributable to a specific vector system (Rhodes, C. A. et al. (1995) Methods Mol. Biol. 55:121-131).

[2777] Although the presence/absence of marker gene expression suggests that the gene of interest is also present, its presence and expression may need to be confirmed. For example, if the sequence encoding a polypeptide is inserted within a marker gene sequence, recombinant cells containing sequences can be identified by the absence of marker gene function. Alternatively, a marker gene can be placed in tandem with a polypeptide-encoding sequence under the control of a single promoter. Expression of the marker gene in response to induction or selection usually indicates expression of the tandem gene as well.

[2778] Alternatively, host cells that contain and express a desired polynucleotide sequence may be identified by a variety of procedures known to those of skill in the art. These procedures include, but are not limited to, DNA-DNA or DNA-RNA hybridizations and protein bioassay or immunoassay techniques which include, for example, membrane, solution, or chip based technologies for the detection and/or quantification of nucleic acid or protein.

[2779] A variety of protocols for detecting and measuring the expression of polynucleotide-encoded products, using either polyclonal or monoclonal antibodies specific for the product are known in the art. Examples include enzyme-linked immunosorbent assay (ELISA), radioimmunoassay (RIA), and fluorescence activated cell sorting (FACS). A two-site, monoclonal-based immunoassay utilizing monoclonal antibodies reactive to two non-interfering epitopes on a given polypeptide may be preferred for some applications, but a competitive binding assay may also be employed. These and other assays are described, among other places, in Hampton, R. et al. (1990; Serological Methods, a Laboratory Manual, APS Press, St Paul. Minn.) and Maddox, D. E. et al. (1983; J. Exp. Med. 158:1211-1216).

[2780] A wide variety of labels and conjugation techniques are known by those skilled in the art and may be used in various nucleic acid and amino acid assays. Means for producing labeled hybridization or PCR probes for detecting sequences related to polynucleotides include oligolabeling, nick translation, end-labeling or PCR amplification using a labeled nucleotide. Alternatively, the sequences, or any portions thereof may be cloned into a vector for the production of an mRNA probe. Such vectors are known in the art, are commercially available, and may be used to synthesize RNA probes in vitro by addition of an appropriate RNA polymerase such as T7, T3, or SP6 and labeled nucleotides. These procedures may be conducted using a variety of commercially available kits. Suitable reporter molecules or labels, which may be used include radionuclides, enzymes, fluorescent, chemiluminescent, or chromogenic agents as well as substrates, cofactors, inhibitors, magnetic particles, and the like.

[2781] Host cells transformed with a polynucleotide sequence of interest may be cultured under conditions suitable for the expression and recovery of the protein from cell culture. The protein produced by a recombinant cell may be secreted or contained intracellularly depending on the sequence and/or the vector used. As will be understood by those of skill in the art, expression vectors containing polynucleotides of the invention may be designed to contain signal sequences which direct secretion of the encoded polypeptide through a prokaryotic or eukaryotic cell membrane. Other recombinant constructions may be used to join sequences encoding a polypeptide of interest to nucleotide sequence encoding a polypeptide domain which will facilitate purification of soluble proteins. Such purification facilitating domains include, but are not limited to, metal chelating peptides such as histidine-tryptophan modules that allow purification on immobilized metals, protein A domains that allow purification on immobilized immunoglobulin, and the domain utilized in the FLAGS extension/affinity purification system (Immunex Corp., Seattle, Wash.). The inclusion of cleavable linker sequences such as those specific for Factor XA or enterokinase (Invitrogen. San Diego, Calif.) between the purification domain and the encoded polypeptide may be used to facilitate purification. One such expression vector provides for expression of a fusion protein containing a polypeptide of interest and a nucleic acid encoding 6 histidine residues preceding a thioredoxin or an enterokinase cleavage site. The histidine residues facilitate purification on IMIAC (immobilized metal ion affinity chromatography) as described in Porath, J. et al. (1992, Prot. Exp. Purif 3:263-281) while the enterokinase cleavage site provides a means for purifying the desired polypeptide from the fusion protein. A discussion of vectors which contain fusion proteins is provided in Kroll, D. J. et al. (1993; DNA Cell Biol. 12:441-453).

[2782] In addition to recombinant production methods, polypeptides of the invention, and fragments thereof, may be produced by direct peptide synthesis using solid-phase techniques (Merrifield J. (1963) J. Am. Chem. Soc. 85:2149-2154). Protein synthesis may be performed using manual techniques or by automation. Automated synthesis may be achieved, for example, using Applied Biosystems 431A Peptide Synthesizer (Perkin Elmer). Alternatively, various fragments may be chemically synthesized separately and combined using chemical methods to produce the full length molecule.

[2783] Antibody Compositions, Fragrments Thereof and Other Binding Agents

[2784] According to another aspect, the present invention further provides binding agents, such as antibodies and antigen-binding fragments thereof, that exhibit immunological binding to a tumor polypeptide disclosed herein, or to a portion, variant or derivative thereof. An antibody, or antigen-binding fragment thereof, is said to “specifically bind,” “immunogically bind,” and/or is “immunologically reactive” to a polypeptide of the invention if it reacts at a detectable level (within, for example, an ELISA assay) with the polypeptide, and does not react detectably with unrelated polypeptides under similar conditions.

[2785] Immunological binding, as used in this context, generally refers to the non-covalent interactions of the type which occur between an immunoglobulin molecule and an antigen for which the immunoglobulin is specific. The strength, or affinity of immunological binding interactions can be expressed in terms of the dissociation constant (K_{d}) of the interaction, wherein a smaller K_{d} represents a greater affinity. Immunological binding properties of selected polypeptides can be quantified using methods well known in the art. One such method entails measuring the rates of antigen-binding site/antigen complex formation and dissociation, wherein those rates depend on the concentrations of the complex partners, the affinity of the interaction, and on geometric parameters that equally influence the rate in both directions. Thus, both the “on rate constant” (Kₒₙ) and the “off rate constant” (K_{off}) can be determined by calculation of the concentrations and the actual rates of association and dissociation. The ratio of K_{off}/Kₒₙ enables cancellation of all parameters not related to affinity, and is thus equal to the dissociation constant K_{d}. See, generally, Davies et al. (1990) Annual Rev. Biochem. 59:439-473.

[2786] An “antigen-binding site,” or “binding portion” of an antibody refers to the part of the immunoglobulin molecule that participates in antigen binding. The antigen binding site is formed by amino acid residues of the N-terminal variable (“V”) regions of the heavy (“H”) and light (“L”) chains. Three highly divergent stretches within the V regions of the heavy and light chains are referred to as “hypervariable regions” which are interposed between more conserved flanking stretches known as “framework regions,” or “FRs”. Thus the term “FR” refers to amino acid sequences which are naturally found between and adjacent to hypervariable regions in immunoglobulins. In an antibody molecule, the three hypervariable regions of a light chain and the three hypervariable regions of a heavy chain are disposed relative to each other in three dimensional space to form an antigen-binding surface. The antigen-binding surface is complementary to the three-dimensional surface of a bound antigen, and the three hypervariable regions of each of the heavy and light chains are referred to as “complementarity-determining regions,” or “CDRs.”

[2787] Binding agents may be further capable of differentiating between patients with and without a cancer, such as colon cancer, using the representative assays provided herein. For example, antibodies or other binding agents that bind to a tumor protein will preferably generate a signal indicating the presence of a cancer in at least about 20% of patients with the disease, more preferably at least about 30% of patients. Alternatively, or in addition, the antibody will generate a negative signal indicating the absence of the disease in at least about 90% of individuals without the cancer. To determine whether a binding agent satisfies this requirement, biological samples (e.g., blood, sera, sputum, urine and/or tumor biopsies) from patients with and without a cancer (as determined using standard clinical tests) may be assayed as described herein for the presence of polypeptides that bind to the binding agent. Preferably, a statistically significant number of samples with and without the disease will be assayed. Each binding agent should satisfy the above criteria; however, those of ordinary skill in the art will recognize that binding agents may be used in combination to improve sensitivity.

[2788] Any agent that satisfies the above requirements may be a binding agent. For example, a binding agent may be a ribosome, with or without a peptide component, an RNA molecule or a polypeptide. In a preferred embodiment, a binding agent is an antibody or an antigen-binding fragment thereof. Antibodies may be prepared by any of a variety of techniques known to those of ordinary skill in the art. See, e.g., Harlow and Lane, Antibodies: A Laboratory Manual, Cold Spring Harbor Laboratory, 1988. In general, antibodies can be produced by cell culture techniques, including the generation of monoclonal antibodies as described herein, or via transfection of antibody genes into suitable bacterial or mammalian cell hosts, in order to allow for the production of recombinant antibodies. In one technique, an immunogen comprising the polypeptide is initially injected into any of a wide variety of mammals (e.g., mice, rats, rabbits, sheep or goats). In this step, the polypeptides of this invention may serve as the immunogen without modification. Alternatively, particularly for relatively short polypeptides, a superior immune response may be elicited if the polypeptide is joined to a carrier protein, such as bovine serum albumin or keyhole limpet hemocyanin. The immunogen is injected into the animal host, preferably according to a predetermined schedule incorporating one or more booster immunizations, and the animals are bled periodically. Polyclonal antibodies specific for the polypeptide may then be purified from such antisera by, for example, affinity chromatography using the polypeptide coupled to a suitable solid support.

[2789] Monoclonal antibodies specific for an antigenic polypeptide of interest may be prepared, for example, using the technique of Kohler and Milstein, Eur. J. Immunol. 6:511-519, 1976, and improvements thereto. Briefly, these methods involve the preparation of immortal cell lines capable of producing antibodies having the desired specificity (i.e., reactivity with the polypeptide of interest). Such cell lines may be produced, for example, from spleen cells obtained from an animal immunized as described above. The spleen cells are then immortalized by, for example, fusion with a myeloma cell fusion partner, preferably one that is syngeneic with the immunized animal. A variety of fusion techniques may be employed. For example, the spleen cells and myeloma cells may be combined with a nonionic detergent for a few minutes and then plated at low density on a selective medium that supports the growth of hybrid cells, but not myeloma cells. A preferred selection technique uses HAT (hypoxanthine, aminopterin, thymidine) selection. After a sufficient time, usually about 1 to 2 weeks, colonies of hybrids are observed. Single colonies are selected and their culture supernatants tested for binding activity against the polypeptide. Hybridomas having high reactivity and specificity are preferred.

[2790] Monoclonal antibodies may be isolated from the supernatants of growing hybridoma colonies. In addition, various techniques may be employed to enhance the yield, such as injection of the hybridoma cell line into the peritoneal cavity of a suitable vertebrate host, such as a mouse. Monoclonal antibodies may then be harvested from the ascites fluid or the blood. Contaminants may be removed from the antibodies by conventional techniques, such as chromatography, gel filtration, precipitation, and extraction. The polypeptides of this invention may be used in the purification process in, for example, an affinity chromatography step.

[2791] A number of therapeutically useful molecules are known in the art which comprise antigen-binding sites that are capable of exhibiting immunological binding properties of an antibody molecule. The proteolytic enzyme papain preferentially cleaves IgG molecules to yield several fragments, two of which (the “F(ab)” fragments) each comprise a covalent heterodimer that includes an intact antigen-binding site. The enzyme pepsin is able to cleave IgG molecules to provide several fragments, including the “F(ab′)₂” fragment which comprises both antigen-binding sites. An “Fv” fragment can be produced by preferential proteolytic cleavage of an IgM, and on rare occasions IgG or IgA immunoglobulin molecule. Fv fragments are, however, more commonly derived using recombinant techniques known in the art. The Fv fragment includes a non-covalent V_{H}::V_{L} heterodimer including an antigen-binding site which retains much of the antigen recognition and binding capabilities of the native antibody molecule. Inbar et al. (1972) Proc. Nat. Acad. Sci. USA 69:2659-2662; Hochman et al. (1976) Biochem 15:2706-2710; and Ehrlich et al. (1980) Biochem 19:4091-4096.

[2792] A single chain Fv (“sFv”) polypeptide is a covalently linked V_{H}::V_{L} heterodimer which is expressed from a gene fusion including V_{H}- and V_{L}-encoding genes linked by a peptide-encoding linker. Huston et al. (1988) Proc. Nat. Acad. Sci. USA 85(16):5879-5883. A number of methods have been described to discern chemical structures for converting the naturally aggregated—but chemically separated—light and heavy polypeptide chains from an antibody V region into an sFv molecule which will fold into a three dimensional structure substantially similar to the structure of an antigen-binding site. See, e.g., U.S. Pat. Nos. 5,091,513 and 5,132,405, to Huston et al.; and U.S. Pat. No. 4,946,778, to Ladner et al.

[2793] Each of the above-described molecules includes a heavy chain and a light chain CDR set, respectively interposed between a heavy chain and a light chain FR set which provide support to the CDRS and define the spatial relationship of the CDRs relative to each other. As used herein, the term “CDR set” refers to the three hypervariable regions of a heavy or light chain V region. Proceeding from the N-terminus of a heavy or light chain, these regions are denoted as “CDR1,” “CDR2,” and “CDR3” respectively. An antigen-binding site, therefore, includes six CDRs, comprising the CDR set from each of a heavy and a light chain V region. A polypeptide comprising a single CDR, (e.g., a CDR1, CDR2 or CDR3) is referred to herein as a “molecular recognition unit.” Crystallographic analysis of a number of antigen-antibody complexes has demonstrated that the amino acid residues of CDRs form extensive contact with bound antigen, wherein the most extensive antigen contact is with the heavy chain CDR3. Thus, the molecular recognition units are primarily responsible for the specificity of an antigen-binding site.

[2794] As used herein, the term “FR set” refers to the four flanking amino acid sequences which frame the CDRs of a CDR set of a heavy or light chain V region. Some FR residues may contact bound antigen; however, FRs are primarily responsible for folding the V region into the antigen-binding site, particularly the FR residues directly adjacent to the CDRS. Within FRs, certain amino residues and certain structural features are very highly conserved. In this regard, all V region sequences contain an internal disulfide loop of around 90 amino acid residues. When the V regions fold into a binding-site, the CDRs are displayed as projecting loop motifs which form an antigen-binding surface. It is generally recognized that there are conserved structural regions of FRs which influence the folded shape of the CDR loops into certain “canonical” structures—regardless of the precise CDR amino acid sequence. Further, certain FR residues are known to participate in non-covalent interdomain contacts which stabilize the interaction of the antibody heavy and light chains.

[2795] A number of “humanized” antibody molecules comprising an antigen-binding site derived from a non-human immunoglobulin have been described, including chimeric antibodies having rodent V regions and their associated CDRs fused to human constant domains (Winter et al. (1991) Nature 349:293-299; Lobuglio et al. (1989) Proc. Nat. Acad. Sci. USA 86:4220-4224; Shaw et al. (1987) J Immunol. 138:4534-4538; and Brown et al. (1987) Cancer Res. 47:3577-3583), rodent CDRs grafted into a human supporting FR prior to fusion with an appropriate human antibody constant domain (Riechmann et al. (1988) Nature 332:323-327; Verhoeyen et al. (1988) Science 239:1534-1536; and Jones et al. (1986) Nature 321:522-525), and rodent CDRs supported by recombinantly veneered rodent FRs (European Patent Publication No. 519,596, published Dec. 23, 1992). These “humanized” molecules are designed to minimize unwanted immunological response toward rodent antihuman antibody molecules which limits the duration and effectiveness of therapeutic applications of those moieties in human recipients.

[2796] As used herein, the terms “veneered FRs” and “recombinantly veneered FRs” refer to the selective replacement of FR residues from, e.g., a rodent heavy or light chain V region, with human FR residues in order to provide a xenogeneic molecule comprising an antigen-binding site which retains substantially all of the native FR polypeptide folding structure. Veneering techniques are based on the understanding that the ligand binding characteristics of an antigen-binding site are determined primarily by the structure and relative disposition of the heavy and light chain CDR sets within the antigen-binding surface. Davies et al. (1990) Ann. Rev. Biochem. 59:439-473. Thus, antigen binding specificity can be preserved in a humanized antibody only wherein the CDR structures, their interaction with each other, and their interaction with the rest of the V region domains are carefully maintained. By using veneering techniques, exterior (e.g., solvent-accessible) FR residues which are readily encountered by the immune system are selectively replaced with human residues to provide a hybrid molecule that comprises *: i either a weakly immunogenic, or substantially non-immunogenic veneered surface.

[2797] The process of veneering makes use of the available sequence data for human antibody variable domains compiled by Kabat et al., in Sequences of Proteins of Immunological Interest, 4th ed., (U.S. Dept. of Health and Human Services, U.S. Government Printing Office, 1987), updates to the Kabat database, and other accessible U.S. and foreign databases (both nucleic acid and protein). Solvent accessibilities of V region amino acids can be deduced from the known three-dimensional structure for human and murine antibody fragments. There are two general steps in veneering a murine antigen-binding site. Initially, the FRs of the variable domains of an antibody molecule of interest are compared with corresponding FR sequences of human variable domains obtained from the above-identified sources. The most homologous human V regions are then compared residue by residue to corresponding murine amino acids. The residues in the murine FR which differ from the human counterpart are replaced by the residues present in the human moiety using recombinant techniques well known in the art. Residue switching is only carried out with moieties which are at least partially exposed (solvent accessible), and care is exercised in the replacement of amino acid residues which may have a significant effect on the tertiary structure of V region domains, such as proline, glycine and charged amino acids.

[2798] In this manner, the resultant “veneered” murine antigen-binding sites are thus designed to retain the murine CDR residues, the residues substantially adjacent to the CDRs, the residues identified as buried or mostly buried (solvent inaccessible), the residues believed to participate in non-covalent (e.g., electrostatic and hydrophobic) contacts between heavy and light chain domains, and the residues from conserved structural regions of the FRs which are believed to influence the “canonical” tertiary structures of the CDR loops. These design criteria are then used to prepare recombinant nucleotide sequences which combine the CDRs of both the heavy and light chain of a murine antigen-binding site into human-appearing FRs that can be used to transfect mammalian cells for the expression of recombinant human antibodies which exhibit the antigen specificity of the murine antibody molecule.

[2799] In another embodiment of the invention, monoclonal antibodies of the present invention may be coupled to one or more therapeutic agents. Suitable agents in this regard include radionuclides, differentiation inducers, drugs, toxins, and derivatives thereof. Preferred radionuclides include ⁹⁰Y, ¹²³I, ¹²⁵I, ¹³¹I, ¹⁸⁶Re, ¹⁸⁸Re, ²¹¹At, and ²¹²Bi. Preferred drugs include methotrexate, and pyrimidine and purine analogs. Preferred differentiation inducers include phorbol esters and butyric acid. Preferred toxins include ricin, abrin, diptheria toxin, cholera toxin, gelonin, Pseudomonas exotoxin, Shigella toxin, and pokeweed antiviral protein.

[2800] A therapeutic agent may be coupled (e.g., covalently bonded) to a suitable monoclonal antibody either directly or indirectly (e.g., via a linker group). A direct reaction between an agent and an antibody is possible when each possesses a substituent capable of reacting with the other. For example, a nucleophilic group, such as an amino or sulfhydryl group, on one may be capable of reacting with a carbonyl-containing group, such as an anhydride or an acid halide, or with an alkyl group containing a good leaving group (e.g., a halide) on the other.

[2801] Alternatively, it may be desirable to couple a therapeutic agent and an antibody via a linker group. A linker group can function as a spacer to distance an antibody from an agent in order to avoid interference with binding capabilities. A linker group can also serve to increase the chemical reactivity of a substituent on an agent or an antibody, and thus increase the coupling efficiency. An increase in chemical reactivity may also facilitate the use of agents, or functional groups on agents, which otherwise would not be possible.

[2802] It will be evident to those skilled in the art that a variety of bifunctional or polyfunctional reagents, both homo- and hetero-functional (such as those described in the catalog of the Pierce Chemical Co., Rockford, Ill.), may be employed as the linker group. Coupling may be effected, for example, through amino groups, carboxyl groups, sulfhydryl groups or oxidized carbohydrate residues. There are numerous references describing such methodology, e.g., U.S. Pat. No. 4,671,958, to Rodwell et al.

[2803] Where a therapeutic agent is more potent when free from the antibody portion of the immunoconjugates of the present invention, it may be desirable to use a linker group which is cleavable during or upon internalization into a cell. A number of different cleavable linker groups have been described. The mechanisms for the intracellular release of an agent from these linker groups include cleavage by reduction of a disulfide bond (e.g., U.S. Pat. No. 4,489,710, to Spitler), by irradiation of a photolabile bond (e.g., U.S. Pat. No. 4,625,014, to Senter et al.), by hydrolysis of derivatized amino acid side chains (e.g., U.S. Pat. No. 4,638,045, to Kohn et al.), by serum complement-mediated hydrolysis (e.g., U.S. Pat. No. 4,671,958, to Rodwell et al.), and acid-catalyzed hydrolysis (e.g., U.S. Pat. No. 4,569,789, to Blattler et al.).

[2804] It may be desirable to couple more than one agent to an antibody. In one embodiment, multiple molecules of an agent are coupled to one antibody molecule. In another embodiment, more than one type of agent may be coupled to one antibody. Regardless of the particular embodiment, immunoconjugates with more than one agent may be prepared in a variety of ways. For example, more than one agent may be coupled directly to an antibody molecule, or linkers that provide multiple sites for attachment can be used. Alternatively, a carrier can be used.

[2805] A carrier may bear the agents in a variety of ways, including covalent bonding either directly or via a linker group. Suitable carriers include proteins such as albumins (e.g., U.S. Pat. No. 4,507,234, to Kato et al.), peptides and polysaccharides such as aminodextran (e.g., U.S. Pat. No. 4,699,784, to Shih et al.). A carrier may also bear an agent by noncovalent bonding or by encapsulation, such as within a liposome vesicle (e.g., U.S. Pat. Nos. 4,429,008 and 4,873,088). Carriers specific for radionuclide agents include radiohalogenated small molecules and chelating compounds. For example, U.S. Pat. No. 4,735,792 discloses representative radiohalogenated small molecules and their synthesis. A radionuclide chelate may be formed from chelating compounds that include those containing nitrogen and sulfur atoms as the donor atoms for binding the metal, or metal oxide, radionuclide. For example, U.S. Pat. No. 4,673,562, to Davison et al. discloses representative chelating compounds and their synthesis.

[2806] T Cell Compositions

[2807] The present invention, in another aspect, provides T cells specific for a tumor polypeptide disclosed herein, or for a variant or derivative thereof. Such cells may generally be prepared in vitro or ex vivo, using standard procedures. For example, T cells may be isolated from bone marrow, peripheral blood, or a fraction of bone marrow or peripheral blood of a patient, using a commercially available cell separation system, such as the Isolex™ System, available from Nexell Therapeutics, Inc. (Irvine, Calif.; see also U.S. Pat. No. 5,240,856; U.S. Pat. No. 5,215,926; WO 89/06280; WO 91/16116 and WO 92/07243). Alternatively, T cells may be derived from related or unrelated humans, non-human mammals, cell lines or cultures.

[2808] T cells may be stimulated with a polypeptide, polynucleotide encoding a polypeptide and/or an antigen presenting cell (APC) that expresses such a polypeptide. Such stimulation is performed under conditions and for a time sufficient to permit the generation of T cells that are specific for the polypeptide of interest. Preferably, a tumor polypeptide or polynucleotide of the invention is present within a delivery vehicle, such as a microsphere, to facilitate the generation of specific T cells.

[2809] T cells are considered to be specific for a polypeptide of the present invention if the T cells specifically proliferate, secrete cytokines or kill target cells coated with the polypeptide or expressing a gene encoding the polypeptide. T cell specificity may be evaluated using any of a variety of standard techniques. For example, within a chromium release assay or proliferation assay, a stimulation index of more than two fold increase in lysis and/or proliferation, compared to negative controls, indicates T cell specificity. Such assays may be performed, for example, as described in Chen et al., Cancer Res. 54:1065-1070, 1994. Alternatively, detection of the proliferation of T cells may be accomplished by a variety of known techniques. For example, T cell proliferation can be detected by measuring an increased rate of DNA synthesis (e.g., by pulse-labeling cultures of T cells with tritiated thymidine and measuring the amount of tritiated thymidine incorporated into DNA). Contact with a tumor polypeptide (100 ng/ml-100 μg/ml, preferably 200 ng/ml-25 μg/ml) for 3-7 days will typically result in at least a two fold increase in proliferation of the T cells. Contact as described above for 2-3 hours should result in activation of the T cells, as measured using standard cytokine assays in which a two fold increase in the level of cytokine release (e.g., TNF or IFN-γ) is indicative of T cell activation (see Coligan et al., Current Protocols in Immunology, vol. 1, Wiley Interscience (Greene 1998)). T cells that have been activated in response to a tumor polypeptide, polynucleotide or polypeptide-expressing APC may be CD4⁺ and/or CD8⁺. Tumor polypeptide-specific T cells may be expanded using standard techniques. Within preferred embodiments, the T cells are derived from a patient, a related donor or an unrelated donor, and are administered to the patient following stimulation and expansion.

[2810] For therapeutic purposes, CD4⁺ or CD8⁺ T cells that proliferate in response to a tumor polypeptide, polynucleotide or APC can be expanded in number either in vitro or in vivo. Proliferation of such T cells in vitro may be accomplished in a variety of ways. For example, the T cells can be re-exposed to a tumor polypeptide, or a short peptide corresponding to an immunogenic portion of such a polypeptide, with or without the addition of T cell growth factors, such as interleukin-2, and/or stimulator cells that synthesize a tumor polypeptide. Alternatively, one or more T cells that proliferate in the presence of the tumor polypeptide can be expanded in number by cloning. Methods for cloning cells are well known in the art, and include limiting dilution.

[2811] Pharmaceutical Compositions In additional embodiments, the present invention concerns formulation of one or more of the polynucleotide, polypeptide, T-cell and/or antibody compositions disclosed herein in pharmaceutically-acceptable carriers for administration to a cell or an animal, either alone, or in combination with one or more other modalities of therapy.

[2812] It will be understood that, if desired, a composition as disclosed herein may be administered in combination with other agents as well, such as, e.g., other proteins or polypeptides or various pharmaceutically-active agents. In fact, there is virtually no limit to other components that may also be included, given that the additional agents do not cause a significant adverse effect upon contact with the target cells or host tissues. The compositions may thus be delivered along with various other agents as required in the particular instance. Such compositions may be purified from host cells or other biological sources, or alternatively may be chemically synthesized as described herein. Likewise, such compositions may further comprise substituted or derivatized RNA or DNA compositions.

[2813] Therefore, in another aspect of the present invention, pharmaceutical compositions are provided comprising one or more of the polynucleotide, polypeptide, antibody, and/or T-cell compositions described herein in combination with a physiologically acceptable carrier. In certain preferred embodiments, the pharmaceutical compositions of the invention comprise immunogenic polynucleotide and/or polypeptide compositions of the invention for use in prophylactic and theraputic vaccine applications. Vaccine preparation is generally described in, for example, M. F. Powell and M. J. Newman, eds., “Vaccine Design (the subunit and adjuvant approach),” Plenum Press (NY, 1995). Generally, such compositions will comprise one or more polynucleotide and/or polypeptide compositions of the present invention in combination with one or more immunostimulants.

[2814] It will be apparent that any of the pharmaceutical compositions described herein can contain pharmaceutically acceptable salts of the polynucleotides and polypeptides of the invention. Such salts can be prepared, for example, from pharmaceutically acceptable non-toxic bases, including organic bases (e.g., salts of primary, secondary and tertiary amines and basic amino acids) and inorganic bases (e.g., sodium, potassium, lithium, ammonium, calcium and magnesium salts).

[2815] In another embodiment, illustrative immunogenic compositions, e.g., vaccine compositions, of the present invention comprise DNA encoding one or more of the polypeptides as described above, such that the polypeptide is generated in situ. As noted above, the polynucleotide may be administered within any of a variety of delivery systems known to those of ordinary skill in the art. Indeed, numerous gene delivery techniques are well known in the art, such as those described by Rolland, Crit. Rev. Therap. Drug Carrier Systems 15:143-198, 1998, and references cited therein. Appropriate polynucleotide expression systems will, of course, contain the necessary regulatory DNA regulatory sequences for expression in a patient (such as a suitable promoter and terminating signal). Alternatively, bacterial delivery systems may involve the administration of a bacterium (such as Bacillus-Calmette-Guerrin) that expresses an immunogenic portion of the polypeptide on its cell surface or secretes such an epitope.

[2816] Therefore, in certain embodiments, polynucleotides encoding immunogenic polypeptides described herein are introduced into suitable mammalian host cells for expression using any of a number of known viral-based systems. In one illustrative embodiment, retroviruses provide a convenient and effective platform for gene delivery systems. A selected nucleotide sequence encoding a polypeptide of the present invention can be inserted into a vector and packaged in retroviral particles using techniques known in the art. The recombinant virus can then be isolated and delivered to a subject. A number of illustrative retroviral systems have been described (e.g., U.S. Pat. No. 5,219,740; Miller and Rosman (1989) BioTechniques 7:980-990; Miller, A. D. (1990) Human Gene Therapy 1:5-14; Scarpa et al. (1991) Virology 180:849-852; Bums et al. (1993) Proc. Natl. Acad. Sci. USA 90:8033-8037; and Boris-Lawrie and Temin (1993) Cur. Opin. Genet. Develop. 3:102-109.

[2817] In addition, a number of illustrative adenovirus-based systems have also been described. Unlike retroviruses which integrate into the host genome, adenoviruses persist extrachromosomally thus minimizing the risks associated with insertional mutagenesis (Haj-Ahmad and Graham (1986) J. Virol. 57:267-274; Bett et al. (1993) J. Virol. 67:5911-5921; Mittereder et al. (1994) Human Gene Therapy 5:717-729; Seth et al. (1994) J. Virol. 68:933-940; Barr et al. (1994) Gene Therapy 1:51-58; Berkner, K. L. (1988) BioTechniques 6:616-629; and Rich et al. (1993) Human Gene Therapy 4:461-476).

[2818] Various adeno-associated virus (AAV) vector systems have also been developed for polynucleotide delivery. AAV vectors can be readily constructed using techniques well known in the art. See, e.g., U.S. Pat. Nos. 5,173,414 and 5,139,941; International Publication Nos. WO 92/01070 and WO 93/03769; Lebkowski et al. (1988) Molec. Cell. Biol. 8:3988-3996; Vincent et al. (1990) Vaccines 90 (Cold Spring Harbor Laboratory Press); Carter, B. J. (1992) Current Opinion in Biotechnology 3:533-539; Muzyczka, N. (1992) Current Topics in Microbiol. and Immunol. 158:97-129; Kotin, R. M. (1994) Human Gene Therapy 5:793-801; Shelling and Smith (1994) Gene Therapy 1:165-169; and Zhou et al. (1994) J. Exp. Med. 179:1867-1875.

[2819] Additional viral vectors useful for delivering the polynucleotides encoding polypeptides of the present invention by gene transfer include those derived from the pox family of viruses, such as vaccinia virus and avian poxvirus. By way of example, vaccinia virus recombinants expressing the novel molecules can be constructed as follows. The DNA encoding a polypeptide is first inserted into an appropriate vector so that it is adjacent to a vaccinia promoter and flanking vaccinia DNA sequences, such as the sequence encoding thymidine kinase (TK). This vector is then used to transfect cells which are simultaneously infected with vaccinia. Homologous recombination serves to insert the vaccinia promoter plus the gene encoding the polypeptide of interest into the viral genome. The resulting TK.sup.(-) recombinant can be selected by culturing the cells in the presence of 5-bromodeoxyuridine and picking viral plaques resistant thereto.

[2820] A vaccinia-based infection/transfection system can be conveniently used to provide for inducible, transient expression or coexpression of one or more polypeptides described herein in host cells of an organism. In this particular system, cells are first infected in vitro with a vaccinia virus recombinant that encodes the bacteriophage T7 RNA polymerase. This polymerase displays exquisite specificity in that it only transcribes templates bearing T7 promoters. Following infection, cells are transfected with the polynucleotide or polynucleotides of interest, driven by a T7 promoter. The polymerase expressed in the cytoplasm from the vaccinia virus recombinant transcribes the transfected DNA into RNA which is then translated into polypeptide by the host translational machinery. The method provides for high level, transient, cytoplasmic production of large quantities of RNA and its translation products. See, e.g., Elroy-Stein and Moss, Proc. Natl. Acad. Sci. USA (1990) 87:6743-6747; Fuerst et al. Proc. Natl. Acad. Sci. USA (1986) 83:8122-8126.

[2821] Alternatively, avipoxviruses, such as the fowlpox and canarypox viruses, can also be used to deliver the coding sequences of interest. Recombinant avipox viruses, expressing immunogens from mammalian pathogens, are known to confer protective immunity when administered to non-avian species. The use of an Avipox vector is particularly desirable in human and other mammalian species since members of the Avipox genus can only productively replicate in susceptible avian species and therefore are not infective in mammalian cells. Methods for producing recombinant Avipoxviruses are known in the art and employ genetic recombination, as described above with respect to the production of vaccinia viruses. See, e.g., WO 91/12882; WO 89/03429; and WO 92/03545.

[2822] Any of a number of alphavirus vectors can also be used for delivery of polynucleotide compositions of the present invention, such as those vectors described in U.S. Pat. Nos. 5,843,723; 6,015,686; 6,008,035 and 6,015,694. Certain vectors based on Venezuelan Equine Encephalitis (VEE) can also be used, illustrative examples of which can be found in U.S. Pat. Nos. 5,505,947 and 5,643,576.

[2823] Moreover, molecular conjugate vectors, such as the adenovirus chimeric vectors described in Michael et al. J. Biol. Chem. (1993) 268:6866-6869 and Wagner et al. Proc. Natl. Acad. Sci. USA (1992) 89:6099-6103, can also be used for gene delivery under the invention.

[2824] Additional illustrative information on these and other known viral-based delivery systems can be found, for example, in Fisher-Hoch et al., Proc. Natl. Acad. Sci. USA 86:317-321, 1989; Flexner et al., Ann. N.Y. Acad. Sci. 569:86-103, 1989; Flexner et al., Vaccine 8:17-21, 1990; U.S. Pat. Nos. 4,603,112, 4,769,330, and 5,017,487; WO 89/01973; U.S. Pat. No. 4,777,127; GB 2,200,651; EP 0,345,242; WO 91/02805; Berkner, Biotechniques 6:616-627, 1988; Rosenfeld et al., Science 252:431-434, 1991; Kolls et al., Proc. Natl. Acad. Sci. USA 91:215-219, 1994; Kass-Eisler et al., Proc. Natl. Acad. Sci. USA 90:11498-11502, 1993; Guzman et al., Circulation 88:2838-2848, 1993; and Guzman et al., Cir. Res. 73:1202-1207, 1993.

[2825] In certain embodiments, a polynucleotide may be integrated into the genome of a target cell. This integration may be in the specific location and orientation via homologous recombination (gene replacement) or it may be integrated in a random, non-specific location (gene augmentation). In yet further embodiments, the polynucleotide may be stably maintained in the cell as a separate, episomal segment of DNA. Such polynucleotide segments or “episomes” encode sequences sufficient to permit maintenance and replication independent of or in synchronization with the host cell cycle. The manner in which the expression construct is delivered to a cell and where in the cell the polynucleotide remains is dependent on the type of expression construct employed.

[2826] In another embodiment of the invention, a polynucleotide is administered/delivered as “naked” DNA, for example as described in Ulmer et al., Science 259:1745-1749, 1993 and reviewed by Cohen, Science 259:1691-1692, 1993. The uptake of naked DNA may be increased by coating the DNA onto biodegradable beads, which are efficiently transported into the cells.

[2827] In still another embodiment, a composition of the present invention can be delivered via a particle bombardment approach, many of which have been described. In one illustrative example, gas-driven particle acceleration can be achieved with devices such as those manufactured by Powderject Pharmaceuticals PLC (Oxford, UK) and Powderject Vaccines Inc. (Madison, Wis.), some examples of which are described in U.S. Pat. Nos. 5,846,796; 6,010,478; 5,865,796; 5,584,807; and EP Patent No. 0500 799. This approach offers a needle-free delivery approach wherein a dry powder formulation of microscopic particles, such as polynucleotide or polypeptide particles, are accelerated to high speed within a helium gas jet generated by a hand held device, propelling the particles into a target tissue of interest.

[2828] In a related embodiment, other devices and methods that may be useful for gas-driven needle-less injection of compositions of the present invention include those provided by Bioject, Inc. (Portland, Oreg.), some examples of which are described in U.S. Pat. Nos. 4,790,824; 5,064,413; 5,312,335; 5,383,851; 5,399,163; 5,520,639 and 5,993,412.

[2829] According to another embodiment, the pharmaceutical compositions described herein will comprise one or more immunostimulants in addition to the immunogenic polynucleotide, polypeptide, antibody, T-cell and/or APC compositions of this invention. An immunostimulant refers to essentially any substance that enhances or potentiates an immune response (antibody and/or cell-mediated) to an exogenous antigen. One preferred type of immunostimulant comprises an adjuvant. Many adjuvants contain a substance designed to protect the antigen from rapid catabolism, such as aluminum hydroxide or mineral oil, and a stimulator of immune responses, such as lipid A, Bortadella pertussis or Mycobacterium tuberculosis derived proteins. Certain adjuvants are commercially available as, for example, Freund's Incomplete Adjuvant and Complete Adjuvant (Difco Laboratories, Detroit, Mich.); Merck Adjuvant 65 (Merck and Company, Inc., Rahway, N.J.); AS-2 (SmithKline Beecham, Philadelphia, Pa.); aluminum salts such as aluminum hydroxide gel (alum) or aluminum phosphate; salts of calcium, iron or zinc; an insoluble suspension of acylated tyrosine; acylated sugars; cationically or anionically derivatized polysaccharides; polyphosphazenes; biodegradable microspheres; monophosphoryl lipid A and quil A. Cytokines, such as GM-CSF, interleukin-2,-7,-12, and other like growth factors, may also be used as adjuvants.

[2830] Within certain embodiments of the invention, the adjuvant composition is preferably one that induces an immune response predominantly of the Th1 type. High levels of Th1-type cytokines (e.g., IFN-γ, TNFα, IL-2 and IL-12) tend to favor the induction of cell mediated immune responses to an administered antigen. In contrast, high levels of Th2-type cytokines (e.g., IL-4, IL-5, IL-6 and IL-10) tend to favor the induction of humoral immune responses. Following application of a vaccine as provided herein, a patient will support an immune response that includes Th1- and Th2-type responses. Within a preferred embodiment, in which a response is predominantly Th1-type, the level of Th1-type cytokines will increase to a greater extent than the level of Th2-type cytokines. The levels of these cytokines may be readily assessed using standard assays. For a review of the families of cytokines, see Mosmann and Coffman, Ann. Rev. Immunol. 7:145-173, 1989.

[2831] Certain preferred adjuvants for eliciting a predominantly Th1-type response include, for example, a combination of monophosphoryl lipid A, preferably 3-de-O-acylated monophosphoryl lipid A, together with an aluminum salt. MPL® adjuvants are available from Corixa Corporation (Seattle, Wash.; see, for example, US Pat. Nos. 4,436,727; 4,877,611; 4,866,034 and 4,912,094). CpG-containing oligonucleotides (in which the CpG dinucleotide is unrethylated) also induce a predominantly Th1 response. Such oligonucleotides are well known and are described, for example, in WO 96/02555, WO 99/33488 and U.S. Pat. Nos. 6,008,200 and 5,856,462. Immunostimulatory DNA sequences are also described, for example, by Sato et al., Science 273:352, 1996. Another preferred adjuvant comprises a saponin, such as Quil A, or derivatives thereof, including QS21 and QS7 (Aquila Biopharmaceuticals Inc., Framingham, Mass.); Escin; Digitonin; or Gypsophila or Chenopodium quinoa saponins. Other preferred formulations include more than one saponin in the adjuvant combinations of the present invention, for example combinations of at least two of the following group comprising QS21, QS7, Quil A, β-escin, or digitonin.

[2832] Alternatively the saponin formulations may be combined with vaccine vehicles composed of chitosan or other polycationic polymers, polylactide and polylactide-co-glycolide particles, poly-N-acetyl glucosamine-based polymer matrix, particles composed of polysaccharides or chemically modified polysaccharides, liposomes and lipid-based particles, particles composed of glycerol monoesters, etc. The saponins may also be formulated in the presence of cholesterol to form particulate structures such as liposomes or ISCOMs. Furthermore, the saponins may be formulated together with a polyoxyethylene ether or ester, in either a non-particulate solution or suspension, or in a particulate structure such as a paucilamelar liposome or ISCOM. The saponins may also be formulated with excipients such as Carbopol^{R} to increase viscosity, or may be formulated in a dry powder form with a powder excipient such as lactose.

[2833] In one preferred embodiment, the adjuvant system includes the combination of a monophosphoryl lipid A and a saponin derivative, such as the combination of QS21 and 3D-MPL® adjuvant, as described in WO 94/00153, or a less reactogenic composition where the QS21 is quenched with cholesterol, as described in WO 96/33739. Other preferred formulations comprise an oil-in-water emulsion and tocopherol. Another particularly preferred adjuvant formulation employing QS21, 3D-MPL® adjuvant and tocopherol in an oil-in-water emulsion is described in WO 95/17210.

[2834] Another enhanced adjuvant system involves the combination of a CpG-containing oligonucleotide and a saponin derivative particularly the combination of CpG and QS21 is disclosed in WO 00/09159. Preferably the formulation additionally comprises an oil in water emulsion and tocopherol.

[2835] Additional illustrative adjuvants for use in the pharmaceutical compositions of the invention include Montanide ISA 720 (Seppic, France), SAF (Chiron, Calif., United States), ISCOMS (CSL), MF-59 (Chiron), the SBAS series of adjuvants (e.g., SBAS-2 or SBAS-4, available from SmithKline Beecham, Rixensart, Belgium), Detox (Enhanzyn®) (Corixa, Hamilton, Mont.), RC-529 (Corixa, Hamilton, Mont.) and other aminoalkyl glucosaminide 4-phosphates (AGPs), such as those described in pending U.S. patent application Ser. Nos. 08/853,826 and 09/074,720, the disclosures of which are incorporated herein by reference in their entireties, and polyoxyethylene ether adjuvants such as those described in WO 99/52549A1.

[2836] Other preferred adjuvants include adjuvant molecules of the general formula

HO(CH₂CH₂O)ₙ—A—R, (I)

[2837] wherein, n is 1-50, A is a bond or —C(O)—, R is C₁₋₅₀ alkyl or Phenyl C₁₋₅₀ alkyl.

[2838] One embodiment of the present invention consists of a vaccine formulation comprising a polyoxyethylene ether of general formula (I), wherein n is between 1 and 50, preferably 4-24, most preferably 9; the R component is C₁₋₅₀, preferably C₄-C₂₀ alkyl and most preferably C₁₂ alkyl, and A is a bond. The concentration of the polyoxyethylene ethers should be in the range 0.1-20%, preferably from 0.1-10%, and most preferably in the range 0.1-1%. Preferred polyoxyethylene ethers are selected from the following group: polyoxyethylene-9-lauryl ether, polyoxyethylene-9-steoryl ether, polyoxyethylene-8-steoryl ether, polyoxyethylene-4-lauryl ether, polyoxyethylene-35-lauryl ether, and polyoxyethylene-23-lauryl ether. Polyoxyethylene ethers such as polyoxyethylene lauryl ether are described in the Merck index (12^{th} edition: entry 7717). These adjuvant molecules are described in WO 99/52549.

[2839] The polyoxyethylene ether according to the general formula (I) above may, if desired, be combined with another adjuvant. For example, a preferred adjuvant combination is preferably with CpG as described in the pending UK patent application GB 9820956.2.

[2840] According to another embodiment of this invention, an immunogenic composition described herein is delivered to a host via antigen presenting cells (APCs), such as dendritic cells, macrophages, B cells, monocytes and other cells that may be engineered to be efficient APCs. Such cells may, but need not, be genetically modified to increase the capacity for presenting the antigen, to improve activation and/or maintenance of the T cell response, to have anti-tumor effects per se and/or to be immunologically compatible with the receiver (i.e., matched HLA haplotype). APCs may generally be isolated from any of a variety of biological fluids and organs, including tumor and peritumoral tissues, and may be autologous, allogeneic, syngeneic or xenogeneic cells.

[2841] Certain preferred embodiments of the present invention use dendritic cells or progenitors thereof as antigen-presenting cells. Dendritic cells are highly potent APCs (Banchereau and Steinman, Nature 392:245-251, 1998) and have been shown to be effective as a physiological adjuvant for eliciting prophylactic or therapeutic antitumor immunity (see Timmerman and Levy, Ann. Rev. Med. 50:507-529, 1999). In general, dendritic cells may be identified based on their typical shape (stellate in situ, with marked cytoplasmic processes (dendrites) visible in vitro), their ability to take up, process and present antigens with high efficiency and their ability to activate naive T cell responses. Dendritic cells may, of course, be engineered to express specific cell-surface receptors or ligands that are not commonly found on dendritic cells in vivo or ex vivo, and such modified dendritic cells are contemplated by the present invention. As an alternative to dendritic cells, secreted vesicles antigen-loaded dendritic cells (called exosomes) may be used within a vaccine (see Zitvogel et al., Nature Med. 4:594-600, 1998).

[2842] Dendritic cells and progenitors may be obtained from peripheral blood, bone marrow, tumor-infiltrating cells, peritumoral tissues-infiltrating cells, lymph nodes, spleen, skin, umbilical cord blood or any other suitable tissue or fluid. For example, dendritic cells may be differentiated ex vivo by adding a combination of cytokines such as GM-CSF, IL-4, IL-13 and/or TNFα to cultures of monocytes harvested from peripheral blood. Alternatively, CD34 positive cells harvested from peripheral blood, umbilical cord blood or bone marrow may be differentiated into dendritic cells by adding to the culture medium combinations of GM-CSF, IL-3, TNFα, CD40 ligand, LPS, flt3 ligand and/or other compound(s) that induce differentiation, maturation and proliferation of dendritic cells.

[2843] Dendritic cells are conveniently categorized as “immature” and “mature” cells, which allows a simple way to discriminate between two well characterized phenotypes. However, this nomenclature should not be construed to exclude all possible intermediate stages of differentiation. Immature dendritic cells are characterized as APC with a high capacity for antigen uptake and processing, which correlates with the high expression of Fcγ receptor and mannose receptor. The mature phenotype is typically characterized by a lower expression of these markers, but a high expression of cell surface molecules responsible for T cell activation such as class I and class II MHC, adhesion molecules (e.g., CD54 and CD11) and costimulatory molecules (e.g., CD40, CD80, CD86 and 4-1BB).

[2844] APCs may generally be transfected with a polynucleotide of the invention (or portion or other variant thereof) such that the encoded polypeptide, or an immunogenic portion thereof, is expressed on the cell surface. Such transfection may take place ex vivo, and a pharmaceutical composition comprising such transfected cells may then be used for therapeutic purposes, as described herein. Alternatively, a gene delivery vehicle that targets a dendritic or other antigen presenting cell may be administered to a patient, resulting in transfection that occurs in vivo. In vivo and ex vivo transfection of dendritic cells, for example, may generally be performed using any methods known in the art, such as those described in WO 97/24447, or the gene gun approach described by Mahvi et al., Immunology and cell Biology 75:456-460, 1997. Antigen loading of dendritic cells may be achieved by incubating dendritic cells or progenitor cells with the tumor polypeptide, DNA (naked or within a plasmid vector) or RNA; or with antigen-expressing recombinant bacterium or viruses (e.g., vaccinia, fowlpox, adenovirus or lentivirus vectors). Prior to loading, the polypeptide may be covalently conjugated to an immunological partner that provides T cell help (e.g., a carrier molecule). Alternatively, a dendritic cell may be pulsed with a non-conjugated immunological partner, separately or in the presence of the polypeptide.

[2845] While any suitable carrier known to those of ordinary skill in the art may be employed in the pharmaceutical compositions of this invention, the type of carrier will typically vary depending on the mode of administration. Compositions of the present invention may be formulated for any appropriate manner of administration, including for example, topical, oral, nasal, mucosal, intravenous, intracranial, intraperitoneal, subcutaneous and intramuscular administration.

[2846] Carriers for use within such pharmaceutical compositions are biocompatible, and may also be biodegradable. In certain embodiments, the formulation preferably provides a relatively constant level of active component release. In other embodiments, however, a more rapid rate of release immediately upon administration may be desired. The formulation of such compositions is well within the level of ordinary skill in the art using known techniques. Illustrative carriers useful in this regard include microparticles of poly(lactide-co-glycolide), polyacrylate, latex, starch, cellulose, dextran and the like. Other illustrative delayed-release carriers include supramolecular biovectors, which comprise a non-liquid hydrophilic core (e.g., a cross-linked polysaccharide or oligosaccharide) and, optionally, an external layer comprising an amphiphilic compound, such as a phospholipid (see e.g., U.S. Pat. No. 5,151,254 and PCT applications WO 94/20078, WO/94/23701 and WO 96/06638). The amount of active compound contained within a sustained release formulation depends upon the site of implantation, the rate and expected duration of release and the nature of the condition to be treated or prevented.

[2847] In another illustrative embodiment, biodegradable microspheres (e.g., polylactate polyglycolate) are employed as carriers for the compositions of this invention. Suitable biodegradable microspheres are disclosed, for example, in U.S. Pat. Nos.4,897,268; 5,075,109; 5,928,647; 5,811,128; 5,820,883; 5,853,763; 5,814,344, 5,407,609 and 5,942,252. Modified hepatitis B core protein carrier systems such as described in WO/99 40934, and references cited therein, will also be useful for many applications. Another illustrative carrier/delivery system employs a carrier comprising particulate-protein complexes, such as those described in U.S. Pat. No. 5,928,647, which are capable of inducing a class I-restricted cytotoxic T lymphocyte responses in a host.

[2848] The pharmaceutical compositions of the invention will often further comprise one or more buffers (e.g., neutral buffered saline or phosphate buffered saline), carbohydrates (e.g., glucose, mannose, sucrose or dextrans), mannitol, proteins, polypeptides or amino acids such as glycine, antioxidants, bacteriostats, chelating agents such as EDTA or glutathione, adjuvants (e.g., aluminum hydroxide), solutes that render the formulation isotonic, hypotonic or weakly hypertonic with the blood of a recipient, suspending agents, thickening agents and/or preservatives. Alternatively, compositions of the present invention may be formulated as a lyophilizate.

[2849] The pharmaceutical compositions described herein may be presented in unit-dose or multi-dose containers, such as sealed ampoules or vials. Such containers are typically sealed in such a way to preserve the sterility and stability of the formulation until use. In general, formulations may be stored as suspensions, solutions or emulsions in oily or aqueous vehicles. Alternatively, a pharmaceutical composition may be stored in a freeze-dried condition requiring only the addition of a sterile liquid carrier immediately prior to use.

[2850] The development of suitable dosing and treatment regimens for using the particular compositions described herein in a variety of treatment regimens, including e.g., oral, parenteral, intravenous, intranasal, and intramuscular administration and formulation, is well known in the art, some of which are briefly discussed below for general purposes of illustration.

[2851] In certain applications, the pharmaceutical compositions disclosed herein may be delivered via oral administration to an animal. As such, these compositions may be formulated with an inert diluent or with an assimilable edible carrier, or they may be enclosed in hard- or soft-shell gelatin capsule, or they may be compressed into tablets, or they may be incorporated directly with the food of the diet.

[2852] The active compounds may even be incorporated with excipients and used in the form of ingestible tablets, buccal tables, troches, capsules, elixirs, suspensions, syrups, wafers, and the like (see, for example, Mathiowitz et al., Nature 1997 Mar 27;386(6623):410-4; Hwang et al., Crit Rev Ther Drug Carrier Syst 1998;15(3):243-84; U.S. Pat. No. 5,641,515; U.S. Pat. No. 5,580,579 and U.S. Pat. No. 5,792,451). Tablets, troches, pills, capsules and the like may also contain any of a variety of additional components, for example, a binder, such as gum tragacanth, acacia, cornstarch, or gelatin; excipients, such as dicalcium phosphate; a disintegrating agent, such as corn starch, potato starch, alginic acid and the like; a lubricant, such as magnesium stearate; and a sweetening agent, such as sucrose, lactose or saccharin may be added or a flavoring agent, such as peppermint, oil of wintergreen, or cherry flavoring. When the dosage unit form is a capsule, it may contain, in addition to materials of the above type, a liquid carrier. Various other materials may be present as coatings or to otherwise modify the physical form of the dosage unit. For instance, tablets, pills, or capsules may be coated with shellac, sugar, or both. Of course, any material used in preparing any dosage unit form should be pharmaceutically pure and substantially non-toxic in the amounts employed. In addition, the active compounds may be incorporated into sustained-release preparation and formulations.

[2853] Typically, these formulations will contain at least about 0.1% of the active compound or more, although the percentage of the active ingredient(s) may, of course, be varied and may conveniently be between about 1 or 2% and about 60% or 70% or more of the weight or volume of the total formulation. Naturally, the amount of active compound(s) in each therapeutically useful composition may be prepared is such a way that a suitable dosage will be obtained in any given unit dose of the compound. Factors such as solubility, bioavailability, biological half-life, route of administration, product shelf life, as well as other pharmacological considerations will be contemplated by one skilled in the art of preparing such pharmaceutical formulations, and as such, a variety of dosages and treatment regimens may be desirable.

[2854] For oral administration the compositions of the present invention may alternatively be incorporated with one or more excipients in the form of a mouthwash, dentifrice, buccal tablet, oral spray, or sublingual orally-administered formulation. Alternatively, the active ingredient may be incorporated into an oral solution such as one containing sodium borate, glycerin and potassium bicarbonate, or dispersed in a dentifrice, or added in a therapeutically-effective amount to a composition that may include water, binders, abrasives, flavoring agents, foaming agents, and humectants. Alternatively the compositions may be fashioned into a tablet or solution form that may be placed under the tongue or otherwise dissolved in the mouth.

[2855] In certain circumstances it will be desirable to deliver the pharmaceutical compositions disclosed herein parenterally, intravenously, intramuscularly, or even intraperitoneally. Such approaches are well known to the skilled artisan, some of which are further described, for example, in U.S. Pat. No. 5,543,158; U.S. Pat. No. 5,641,515 and U.S. Pat. No. 5,399,363. In certain embodiments, solutions of the active compounds as free base or pharmacologically acceptable salts may be prepared in water suitably mixed with a surfactant, such as hydroxypropylcellulose. Dispersions may also be prepared in glycerol, liquid polyethylene glycols, and mixtures thereof and in oils. Under ordinary conditions of storage and use, these preparations generally will contain a preservative to prevent the growth of microorganisms.

[2856] Illustrative pharmaceutical forms suitable for injectable use include sterile aqueous solutions or dispersions and sterile powders for the extemporaneous preparation of sterile injectable solutions or dispersions (for example, see U.S. Pat. No. 5,466,468). In all cases the form must be sterile and must be fluid to the extent that easy syringability exists. It must be stable under the conditions of manufacture and storage and must be preserved against the contaminating action of microorganisms, such as bacteria and fungi. The carrier can be a solvent or dispersion medium containing, for example, water, ethanol, polyol (e.g., glycerol, propylene glycol, and liquid polyethylene glycol, and the like), suitable mixtures thereof, and/or vegetable oils. Proper fluidity may be maintained, for example, by the use of a coating, such as lecithin, by the maintenance of the required particle size in the case of dispersion and/or by the use of surfactants. The prevention of the action of microorganisms can be facilitated by various antibacterial and antifungal agents, for example, parabens, chlorobutanol, phenol, sorbic acid, thimerosal, and the like. In many cases, it will be preferable to include isotonic agents, for example, sugars or sodium chloride. Prolonged absorption of the injectable compositions can be brought about by the use in the compositions of agents delaying absorption, for example, aluminum monostearate and gelatin.

[2857] In one embodiment, for parenteral administration in an aqueous solution, the solution should be suitably buffered if necessary and the liquid diluent first rendered isotonic with sufficient saline or glucose. These particular aqueous solutions are especially suitable for intravenous, intramuscular, subcutaneous and intraperitoneal administration. In this connection, a sterile aqueous medium that can be employed will be known to those of skill in the art in light of the present disclosure. For example, one dosage may be dissolved in 1 ml of isotonic NaCl solution and either added to 1000 ml of hypodermoclysis fluid or injected at the proposed site of infusion, (see for example, “Remington's Pharmaceutical Sciences” 15th Edition, pages 1035-1038 and 1570-1580). Some variation in dosage will necessarily occur depending on the condition of the subject being treated. Moreover, for human administration, preparations will of course preferably meet sterility, pyrogenicity, and the general safety and purity standards as required by FDA Office of Biologics standards.

[2858] In another embodiment of the invention, the compositions disclosed herein may be formulated in a neutral or salt form. Illustrative pharmaceutically-acceptable salts include the acid addition salts (formed with the free amino groups of the protein) and which are formed with inorganic acids such as, for example, hydrochloric or phosphoric acids, or such organic acids as acetic, oxalic, tartaric, mandelic, and the like. Salts formed with the free carboxyl groups can also be derived from inorganic bases such as, for example, sodium, potassium, ammonium, calcium, or ferric hydroxides, and such organic bases as isopropylamine, trimethylamine, histidine, procaine and the like. Upon formulation, solutions will be administered in a manner compatible with the dosage formulation and in such amount as is therapeutically effective.

[2859] The carriers can further comprise any and all solvents, dispersion media, vehicles, coatings, diluents, antibacterial and antifungal agents, isotonic and absorption delaying agents, buffers, carrier solutions, suspensions, colloids, and the like. The use of such media and agents for pharmaceutical active substances is well known in the art. Except insofar as any conventional media or agent is incompatible with the active ingredient, its use in the therapeutic compositions is contemplated. Supplementary active ingredients can also be incorporated into the compositions. The phrase “pharmaceutically-acceptable” refers to molecular entities and compositions that do not produce an allergic or similar untoward reaction when administered to a human.

[2860] In certain embodiments, the pharmaceutical compositions may be delivered by intranasal sprays, inhalation, and/or other aerosol delivery vehicles. Methods for delivering genes, nucleic acids, and peptide compositions directly to the lungs via nasal aerosol sprays has been described, e.g., in U.S. Pat. No. 5,756,353 and U.S. Pat. No. 5,804,212. Likewise, the delivery of drugs using intranasal microparticle resins (Takenaga et al., J Controlled Release 1998 Mar 2;52(1-2):81-7) and lysophosphatidyl-glycerol compounds (U.S. Pat. No. 5,725,871) are also well-known in the pharmaceutical arts. Likewise, illustrative transmucosal drug delivery in the form of a polytetrafluoroetheylene support matrix is described in U.S. Pat. No. 5,780,045.

[2861] In certain embodiments, liposomes, nanocapsules, microparticles, lipid particles, vesicles, and the like, are used for the introduction of the compositions of the present invention into suitable host cells/organisms. In particular, the compositions of the present invention may be formulated for delivery either encapsulated in a lipid particle, a liposome, a vesicle, a nanosphere, or a nanoparticle or the like. Alternatively, compositions of the present invention can be bound, either covalently or non-covalently, to the surface of such carrier vehicles.

[2862] The formation and use of liposome and liposome-like preparations as potential drug carriers is generally known to those of skill in the art (see for example, Lasic, Trends Biotechnol 1998 Jul;16(7):307-21; Takakura, Nippon Rinsho 1998 Mar;56(3):691-5; Chandran et al., Indian J Exp Biol. 1997 Aug;35(8):801-9; Margalit, Crit Rev Ther Drug Carrier Syst. 1995;12(2-3):233-61; U.S. Pat. No. 5,567,434; U.S. Pat. No. 5,552,157; U.S. Pat. No. 5,565,213; U.S. Pat. No. 5,738,868 and U.S. Pat. No. 5,795,587, each specifically incorporated herein by reference in its entirety).

[2863] Liposomes have been used successfully with a number of cell types that are normally difficult to transfect by other procedures, including T cell suspensions, primary hepatocyte cultures and PC 12 cells (Renneisen et al., J Biol Chem. 1990 Sep 25;265(27):16337-42; Muller et al., DNA Cell Biol. 1990 Apr;9(3):221-9). In addition, liposomes are free of the DNA length constraints that are typical of viral-based delivery systems. Liposomes have been used effectively to introduce genes, various drugs, radiotherapeutic agents, enzymes, viruses, transcription factors, allosteric effectors and the like, into a variety of cultured cell lines and animals. Furthermore, he use of liposomes does not appear to be associated with autoimmune responses or unacceptable toxicity after systemic delivery.

[2864] In certain embodiments, liposomes are formed from phospholipids that are dispersed in an aqueous medium and spontaneously form multilamellar concentric bilayer vesicles (also termed multilamellar vesicles (MLVs).

[2865] Alternatively, in other embodiments, the invention provides for pharmaceutically-acceptable nanocapsule formulations of the compositions of the present invention. Nanocapsules can generally entrap compounds in a stable and reproducible way (see, for example, Quintanar-Guerrero et al., Drug Dev Ind Pharm. 1998 Dec;24(12):1113-28). To avoid side effects due to intracellular polymeric overloading, such ultrafine particles (sized around 0.1 μm) may be designed using polymers able to be degraded in vivo. Such particles can be made as described, for example, by Couvreur et al., Crit Rev Ther Drug Carrier Syst. 1988;5(1):1-20; Eur Muhlen et al., Eur J Pharm Biopharm. 1998 Mar;45(2):149-55; Zambaux et al. J Controlled Release. 1998 Jan 2;50(1-3):31-40; and U.S. Pat. No. 5,145,684.

[2866] Cancer Therapeutic Methods

[2867] In further aspects of the present invention, the pharmaceutical compositions described herein may be used for the treatment of cancer, particularly for the immunotherapy of colon cancer. Within such methods, the pharmaceutical compositions described herein are administered to a patient, typically a warm-blooded animal, preferably a human. A patient may or may not be afflicted with cancer. Accordingly, the above pharmaceutical compositions may be used to prevent the development of a cancer or to treat a patient afflicted with a cancer. Pharmaceutical compositions and vaccines may be administered either prior to or following surgical removal of primary tumors and/or treatment such as administration of radiotherapy or conventional chemotherapeutic drugs. As discussed above, administration of the pharmaceutical compositions may be by any suitable method, including administration by intravenous, intraperitoneal, intramuscular, subcutaneous, intranasal, intradermal, anal, vaginal, topical and oral routes.

[2868] Within certain embodiments, immunotherapy may be active immunotherapy, in which treatment relies on the in vivo stimulation of the endogenous host immune system to react against tumors with the administration of immune response-modifying agents (such as polypeptides and polynucleotides as provided herein).

[2869] Within other embodiments, immunotherapy may be passive immunotherapy, in which treatment involves the delivery of agents with established tumor-immune reactivity (such as effector cells or antibodies) that can directly or indirectly mediate antitumor effects and does not necessarily depend on an intact host immune system. Examples of effector cells include T cells as discussed above, T lymphocytes (such as CD8⁺ cytotoxic T lymphocytes and CD4⁺ T-helper tumor-infiltrating lymphocytes), killer cells (such as Natural Killer cells and lymphokine-activated killer cells), B cells and antigen-presenting cells (such as dendritic cells and macrophages) expressing a polypeptide provided herein. T cell receptors and antibody receptors specific for the polypeptides recited herein may be cloned, expressed and transferred into other vectors or effector cells for adoptive immunotherapy. The polypeptides provided herein may also be used to generate antibodies or anti-idiotypic antibodies (as described above and in U.S. Pat. No. 4,918,164) for passive immunotherapy.

[2870] Effector cells may generally be obtained in sufficient quantities for adoptive immunotherapy by growth in vitro, as described herein. Culture conditions for expanding single antigen-specific effector cells to several billion in number with retention of antigen recognition in vivo are well known in the art. Such in vitro culture conditions typically use intermittent stimulation with antigen, often in the presence of cytokines (such as IL-2) and non-dividing feeder cells. As noted above, immunoreactive polypeptides as provided herein may be used to rapidly expand antigen-specific T cell cultures in order to generate a sufficient number of cells for immunotherapy. In particular, antigen-presenting cells, such as dendritic, macrophage, monocyte, fibroblast and/or B cells, may be pulsed with immunoreactive polypeptides or transfected with one or more polynucleotides using standard techniques well known in the art. For example, antigen-presenting cells can be transfected with a polynucleotide having a promoter appropriate for increasing expression in a recombinant virus or other expression system. Cultured effector cells for use in therapy must be able to grow and distribute widely, and to survive long term in vivo. Studies have shown that cultured effector cells can be induced to grow in vivo and to survive long term in substantial numbers by repeated stimulation with antigen supplemented with IL-2 (see, for example, Cheever et al., Immunological Reviews 157:177, 1997).

[2871] Alternatively, a vector expressing a polypeptide recited herein may be introduced into antigen presenting cells taken from a patient and clonally propagated ex vivo for transplant back into the same patient. Transfected cells may be reintroduced into the patient using any means known in the art, preferably in sterile form by intravenous, intracavitary, intraperitoneal or intratumor administration.

[2872] Routes and frequency of administration of the therapeutic compositions described herein, as well as dosage, will vary from individual to individual, and may be readily established using standard techniques. In general, the pharmaceutical compositions and vaccines may be administered by injection (e.g., intracutaneous, intramuscular, intravenous or subcutaneous), intranasally (e.g., by aspiration) or orally. Preferably, between 1 and 10 doses may be administered over a 52 week period. Preferably, 6 doses are administered, at intervals of 1 month, and booster vaccinations may be given periodically thereafter. Alternate protocols may be appropriate for individual patients. A suitable dose is an amount of a compound that, when administered as described above, is capable of promoting an anti-tumor immune response, and is at least 10-50% above the basal (i.e., untreated) level. Such response can be monitored by measuring the anti-tumor antibodies in a patient or by vaccine-dependent generation of cytolytic effector cells capable of killing the patient's tumor cells in vitro. Such vaccines should also be capable of causing an immune response that leads to an improved clinical outcome (e.g., more frequent remissions, complete or partial or longer disease-free survival) in vaccinated patients as compared to non-vaccinated patients. In general, for pharmaceutical compositions and vaccines comprising one or more polypeptides, the amount of each polypeptide present in a dose ranges from about 25 μg to 5 mg per kg of host. Suitable dose sizes will vary with the size of the patient, but will typically range from about 0.1 mL to about 5 mL.

[2873] In general, an appropriate dosage and treatment regimen provides the active compound(s) in an amount sufficient to provide therapeutic and/or prophylactic benefit. Such a response can be monitored by establishing an improved clinical outcome (e.g., more frequent remissions, complete or partial, or longer disease-free survival) in treated patients as compared to non-treated patients. Increases in preexisting immune responses to a tumor protein generally correlate with an improved clinical outcome. Such immune responses may generally be evaluated using standard proliferation, cytotoxicity or cytokine assays, which may be performed using samples obtained from a patient before and after treatment.

[2874] Cancer Detection and Diagnostic Compositions, Methods and Kits

[2875] In general, a cancer may be detected in a patient based on the presence of one or more colon tumor proteins and/or polynucleotides encoding such proteins in a biological sample (for example, blood, sera, sputum urine and/or tumor biopsies) obtained from the patient. In other words, such proteins may be used as markers to indicate the presence or absence of a cancer such as colon cancer. In addition, such proteins may be useful for the detection of other cancers. The binding agents provided herein generally permit detection of the level of antigen that binds to the agent in the biological sample. Polynucleotide primers and probes may be used to detect the level of mRNA encoding a tumor protein, which is also indicative of the presence or absence of a cancer. In general, a colon tumor sequence should be present at a level that is at least three fold higher in tumor tissue than in normal tissue.

[2876] There are a variety of assay formats known to those of ordinary skill in the art for using a binding agent to detect polypeptide markers in a sample. See, e.g., Harlow and Lane, Antibodies: A Laboratory Manual, Cold Spring Harbor Laboratory, 1988. In general, the presence or absence of a cancer in a patient may be determined by (a) contacting a biological sample obtained from a patient with a binding agent; (b) detecting in the sample a level of polypeptide that binds to the binding agent; and (c) comparing the level of polypeptide with a predetermined cut-off value.

[2877] In a preferred embodiment, the assay involves the use of binding agent immobilized on a solid support to bind to and remove the polypeptide from the remainder of the sample. The bound polypeptide may then be detected using a detection reagent that contains a reporter group and specifically binds to the binding agent/polypeptide complex. Such detection reagents may comprise, for example, a binding agent that specifically binds to the polypeptide or an antibody or other agent that specifically binds to the binding agent, such as an anti-immunoglobulin, protein G, protein A or a lectin. Alternatively, a competitive assay may be utilized, in which a polypeptide is labeled with a reporter group and allowed to bind to the immobilized binding agent after incubation of the binding agent with the sample. The extent to which components of the sample inhibit the binding of the labeled polypeptide to the binding agent is indicative of the reactivity of the sample with the immobilized binding agent. Suitable polypeptides for use within such assays include full length colon tumor proteins and polypeptide portions thereof to which the binding agent binds, as described above.

[2878] The solid support may be any material known to those of ordinary skill in the art to which the tumor protein may be attached. For example, the solid support may be a test well in a microtiter plate or a nitrocellulose or other suitable membrane. Alternatively, the support may be a bead or disc, such as glass, fiberglass, latex or a plastic material such as polystyrene or polyvinylchloride. The support may also be a magnetic particle or a fiber optic sensor, such as those disclosed, for example, in U.S. Pat. No. 5,359,681. The binding agent may be immobilized on the solid support using a variety of techniques known to those of skill in the art, which are amply described in the patent and scientific literature. In the context of the present invention, the term “immobilization” refers to both noncovalent association, such as adsorption, and covalent attachment (which may be a direct linkage between the agent and functional groups on the support or may be a linkage by way of a cross-linking agent). Immobilization by adsorption to a well in a microtiter plate or to a membrane is preferred. In such cases, adsorption may be achieved by contacting the binding agent, in a suitable buffer, with the solid support for a suitable amount of time. The contact time varies with temperature, but is typically between about 1 hour and about 1 day. In general, contacting a well of a plastic microtiter plate (such as polystyrene or polyvinylchloride) with an amount of binding agent ranging from about 10 ng to about 10 μg, and preferably about 100 ng to about 1 μg, is sufficient to immobilize an adequate amount of binding agent.

[2879] Covalent attachment of binding agent to a solid support may generally be achieved by first reacting the support with a bifunctional reagent that will react with both the support and a functional group, such as a hydroxyl or amino group, on the binding agent. For example, the binding agent may be covalently attached to supports having an appropriate polymer coating using benzoquinone or by condensation of an aldehyde group on the support with an amine and an active hydrogen on the binding partner (see, e.g., Pierce Immunotechnology Catalog and Handbook, 1991, at A12-A13).

[2880] In certain embodiments, the assay is a two-antibody sandwich assay. This assay may be performed by first contacting an antibody that has been immobilized on a solid support, commonly the well of a microtiter plate, with the sample, such that polypeptides within the sample are allowed to bind to the immobilized antibody. Unbound sample is then removed from the immobilized polypeptide-antibody complexes and a detection reagent (preferably a second antibody capable of binding to a different site on the polypeptide) containing a reporter group is added. The amount of detection reagent that remains bound to the solid support is then determined using a method appropriate for the specific reporter group.

[2881] More specifically, once the antibody is immobilized on the support as described above, the remaining protein binding sites on the support are typically blocked. Any suitable blocking agent known to those of ordinary skill in the art, such as bovine serum albumin or Tween 20™ (Sigma Chemical Co., St. Louis, Mo.). The immobilized antibody is then incubated with the sample, and polypeptide is allowed to bind to the antibody. The sample may be diluted with a suitable diluent, such as phosphate-buffered saline (PBS) prior to incubation. In general, an appropriate contact time (i.e., incubation time) is a period of time that is sufficient to detect the presence of polypeptide within a sample obtained from an individual with colon cancer. Preferably, the contact time is sufficient to achieve a level of binding that is at least about 95% of that achieved at equilibrium between bound and unbound polypeptide. Those of ordinary skill in the art will recognize that the time necessary to achieve equilibrium may be readily determined by assaying the level of binding that occurs over a period of time. At room temperature, an incubation time of about 30 minutes is generally sufficient.

[2882] Unbound sample may then be removed by washing the solid support with an appropriate buffer, such as PBS containing 0.1% Tween 20™. The second antibody, which contains a reporter group, may then be added to the solid support. Preferred reporter groups include those groups recited above.

[2883] The detection reagent is then incubated with the immobilized antibody-polypeptide complex for an amount of time sufficient to detect the bound polypeptide. An appropriate amount of time may generally be determined by assaying the level of binding that occurs over a period of time. Unbound detection reagent is then removed and bound detection reagent is detected using the reporter group. The method employed for detecting the reporter group depends upon the nature of the reporter group. For radioactive groups, scintillation counting or autoradiographic methods are generally appropriate. Spectroscopic methods may be used to detect dyes, luminescent groups and fluorescent groups. Biotin may be detected using avidin, coupled to a different reporter group (commonly a radioactive or fluorescent group or an enzyme). Enzyme reporter groups may generally be detected by the addition of substrate (generally for a specific period of time), followed by spectroscopic or other analysis of the reaction products.

[2884] To determine the presence or absence of a cancer, such as colon cancer, the signal detected from the reporter group that remains bound to the solid support is generally compared to a signal that corresponds to a predetermined cut-off value. In one preferred embodiment, the cut-off value for the detection of a cancer is the average mean signal obtained when the immobilized antibody is incubated with samples from patients without the cancer. In general, a sample generating a signal that is three standard deviations above the predetermined cut-off value is considered positive for the cancer. In an alternate preferred embodiment, the cut-off value is determined using a Receiver Operator Curve, according to the method of Sackett et al., Clinical Epidemiology: A Basic Science for Clinical Medicine, Little Brown and Co., 1985, p. 106-7. Briefly, in this embodiment, the cut-off value may be determined from a plot of pairs of true positive rates (i.e., sensitivity) and false positive rates (100%-specificity) that correspond to each possible cut-off value for the diagnostic test result. The cut-off value on the plot that is the closest to the upper left-hand corner (i.e., the value that encloses the largest area) is the most accurate cut-off value, and a sample generating a signal that is higher than the cut-off value determined by this method may be considered positive. Alternatively, the cut-off value may be shifted to the left along the plot, to minimize the false positive rate, or to the right, to minimize the false negative rate. In general, a sample generating a signal that is higher than the cut-off value determined by this method is considered positive for a cancer.

[2885] In a related embodiment, the assay is performed in a flow-through or strip test format, wherein the binding agent is immobilized on a membrane, such as nitrocellulose. In the flow-through test, polypeptides within the sample bind to the immobilized binding agent as the sample passes through the membrane. A second, labeled binding agent then binds to the binding agent-polypeptide complex as a solution containing the second binding agent flows through the membrane. The detection of bound second binding agent may then be performed as described above. In the strip test format, one end of the membrane to which binding agent is bound is immersed in a solution containing the sample. The sample migrates along the membrane through a region containing second binding agent and to the area of immobilized binding agent. Concentration of second binding agent at the area of immobilized antibody indicates the presence of a cancer. Typically, the concentration of second binding agent at that site generates a pattern, such as a line, that can be read visually. The absence of such a pattern indicates a negative result. In general, the amount of binding agent immobilized on the membrane is selected to generate a visually discernible pattern when the biological sample contains a level of polypeptide that would be sufficient to generate a positive signal in the two-antibody sandwich assay, in the format discussed above. Preferred binding agents for use in such assays are antibodies and antigen-binding fragments thereof. Preferably, the amount of antibody immobilized on the membrane ranges from about 25 ng to about 1 μg, and more preferably from about 50 ng to about 500 ng. Such tests can typically be performed with a very small amount of biological sample.

[2886] Of course, numerous other assay protocols exist that are suitable for use with the tumor proteins or binding agents of the present invention. The above descriptions are intended to be exemplary only. For example, it will be apparent to those of ordinary skill in the art that the above protocols may be readily modified to use tumor polypeptides to detect antibodies that bind to such polypeptides in a biological sample. The detection of such tumor protein specific antibodies may correlate with the presence of a cancer.

[2887] A cancer may also, or alternatively, be detected based on the presence of T cells that specifically react with a tumor protein in a biological sample. Within certain methods, a biological sample comprising CD4⁺ and/or CD8⁺ T cells isolated from a patient is incubated with a tumor polypeptide, a polynucleotide encoding such a polypeptide and/or an APC that expresses at least an immunogenic portion of such a polypeptide, and the presence or absence of specific activation of the T cells is detected. Suitable biological samples include, but are not limited to, isolated T cells. For example, T cells may be isolated from a patient by routine techniques (such as by Ficoll/Hypaque density gradient centrifugation of peripheral blood lymphocytes). T cells may be incubated in vitro for 2-9 days (typically 4 days) at 37° C. with polypeptide (e.g., 5-25 μg/ml). It may be desirable to incubate another aliquot of a T cell sample in the absence of colontumor polypeptide to serve as a control. For CD4⁺ T cells, activation is preferably detected by evaluating proliferation of the T cells. For CD8⁺ T cells, activation is preferably detected by evaluating cytolytic activity. A level of proliferation that is at least two fold greater and/or a level of cytolytic activity that is at least 20% greater than in disease-free patients indicates the presence of a cancer in the patient.

[2888] As noted above, a cancer may also, or alternatively, be detected based on the level of mRNA encoding a colontumor protein in a biological sample. For example, at least two oligonucleotide primers may be employed in a polymerase chain reaction (PCR) based assay to amplify a portion of a tumor cDNA derived from a biological sample, wherein at least one of the oligonucleotide primers is specific for (i.e., hybridizes to) a polynucleotide encoding the tumor protein. The amplified cDNA is then separated and detected using techniques well known in the art, such as gel electrophoresis. Similarly, oligonucleotide probes that specifically hybridize to a polynucleotide encoding a tumor protein may be used in a hybridization assay to detect the presence of polynucleotide encoding the tumor protein in a biological sample.

[2889] To permit hybridization under assay conditions, oligonucleotide primers and probes should comprise an oligonucleotide sequence that has at least about 60%, preferably at least about 75% and more preferably at least about 90%, identity to a portion of a polynucleotide encoding a tumor protein of the invention that is at least 10 nucleotides, and preferably at least 20 nucleotides, in length. Preferably, oligonucleotide primers and/or probes hybridize to a polynucleotide encoding a polypeptide described herein under moderately stringent conditions, as defined above. Oligonucleotide primers and/or probes which may be usefully employed in the diagnostic methods described herein preferably are at least 10-40 nucleotides in length. In a preferred embodiment, the oligonucleotide primers comprise at least 10 contiguous nucleotides, more preferably at least 15 contiguous nucleotides, of a DNA molecule having a sequence as disclosed herein. Techniques for both PCR based assays and hybridization assays are well known in the art (see, for example, Mullis et al., Cold Spring Harbor Symp. Quant. Biol., 51:263, 1987; Erlich ed., PCR Technology, Stockton Press, N.Y., 1989).

[2890] One preferred assay employs RT-PCR, in which PCR is applied in conjunction with reverse transcription. Typically, RNA is extracted from a biological sample, such as biopsy tissue, and is reverse transcribed to produce cDNA molecules. PCR amplification using at least one specific primer generates a cDNA molecule, which may be separated and visualized using, for example, gel electrophoresis. Amplification may be performed on biological samples taken from a test patient and from an individual who is not afflicted with a cancer. The amplification reaction may be performed on several dilutions of cDNA spanning two orders of magnitude. A two-fold or greater increase in expression in several dilutions of the test patient sample as compared to the same dilutions of the non-cancerous sample is typically considered positive.

[2891] In another embodiment, the compositions described herein may be used as markers for the progression of cancer. In this embodiment, assays as described above for the diagnosis of a cancer may be performed over time, and the change in the level of reactive polypeptide(s) or polynucleotide(s) evaluated. For example, the assays may be performed every 24-72 hours for a period of 6 months to 1 year, and thereafter performed as needed. In general, a cancer is progressing in those patients in whom the level of polypeptide or polynucleotide detected increases over time. In contrast, the cancer is not progressing when the level of reactive polypeptide or polynucleotide either remains constant or decreases with time.

[2892] Certain in vivo diagnostic assays may be performed directly on a tumor. One such assay involves contacting tumor cells with a binding agent. The bound binding agent may then be detected directly or indirectly via a reporter group. Such binding agents may also be used in histological applications. Alternatively, polynucleotide probes may be used within such applications.

[2893] As noted above, to improve sensitivity, multiple tumor protein markers may be assayed within a given sample. It will be apparent that binding agents specific for different proteins provided herein may be combined within a single assay. Further, multiple primers or probes may be used concurrently. The selection of tumor protein markers may be based on routine experiments to determine combinations that results in optimal sensitivity. In addition, or alternatively, assays for tumor proteins provided herein may be combined with assays for other known tumor antigens.

[2894] The present invention further provides kits for use within any of the above diagnostic methods. Such kits typically comprise two or more components necessary for performing a diagnostic assay. Components may be compounds, reagents, containers and/or equipment. For example, one container within a kit may contain a monoclonal antibody or fragment thereof that specifically binds to a tumor protein. Such antibodies or fragments may be provided attached to a support material, as described above. One or more additional containers may enclose elements, such as reagents or buffers, to be used in the assay. Such kits may also, or alternatively, contain a detection reagent as described above that contains a reporter group suitable for direct or indirect detection of antibody binding.

[2895] Alternatively, a kit may be designed to detect the level of mRNA encoding a tumor protein in a biological sample. Such kits generally comprise at least one oligonucleotide probe or primer, as described above, that hybridizes to a polynucleotide encoding a tumor protein. Such an oligonucleotide may be used, for example, within a PCR or hybridization assay. Additional components that may be present within such kits include a second oligonucleotide and/or a diagnostic reagent or container to facilitate the detection of a polynucleotide encoding a tumor protein.

[2896] The following Examples are offered by way of illustration and not by way of limitation.

### EXAMPLES

### Example 1

### Identification Of Colon Tumor Protein cDNAs

[2897] This Example illustrates the identification of cDNA molecules differentially expressed in colon tumors versus normal tissues.

[2898] A colon tumor cell line subtracted library (CTLS1) was generated by conventional, biotin-streptavidin subtraction. Briefly, 10 μg plasmid DNA from the colon tumor cell line 391-12 library (754-1) was subtracted against 100 μg biotinylated driver [25% normal colon library, 25% normal liver and salivary gland library, and 50% pooled driver library (liver, pancreas, skin, bone marrow, resting PBMC, stomach, and whole brain)]. Two biotin-streptavidin subtractions were performed, one after an overnight hybridization and one after a 2-hour hybridization. cDNA remaining after the two subtractions was ligated into a Not I-cut pcDNA3.1 (+) vector, electroporated into ElectroMAX DH10B cells, and grown on agar plates containing ampicillin. Clones were randomly selected for individual amplification. Turbo miniprep DNA was prepared from each clone and characterized by sequencing and database analysis.

[2899] A total of 1248 clones from the CTLS1 conventional subtraction library were analyzed on Colon Chip 4 using cDNA microarray technology, essentially as described in Shena et al.(Shena, M. et al., 1995 Science 270:467-70). Briefly, clones are arrayed onto glass slides as multiple replicas, with each location corresponding to a unique cDNA clone. 30-35 replica chips are typically hybridized with a wide variety of cDNA probe pairs, derived from tumor-specific and normal tissue cDNA sources, that are fluorescence-labeled with Cy3 and Cy5, respectively. After hybridization, the chips are scanned and the fluorescence intensities recorded for both Cy3 and Cy5 channels. The relative intensities of the Cy3 and Cy5 signals thereby provide information about the expression of the cDNA clones in tumors versus normal tissues.

[2900] From this analysis, 146 clones were sequenced based on the fact that they showed greater than 2-fold overexpression in colon tumors versus a set of normal tissues. 71 separate cDNA sequences were derived from these clones, and are set forth in SEQ ID NOs:1-71.

[2901] Additional subtracted libraries, CCLS1 and CCLS2, were made by a PCR-based subtraction method Briefly, colon tumor cell lines were established from colon adenocarcinoma tissue grown in SCID mice. cDNAs from three pools of colon tumor cell lines were synthesized and subtracted with a set of transcripts from normal lung, adrenal gland, bone marrow, small intestine, stomach, pancreas, normal colon, HMEC (human mammary epithelial cell line) and SCID mouse liver/spleen samples. For the ADPS library, cDNAs from three colon adenocarcinoma samples were synthesized and subtracted with a set of transcripts from normal lung, adrenal gland, bone marrow, small intestine, stomach, pancreas, normal colon, HMEC (human mammary epithelial cell line) and SCID mouse liver/spleen samples. 288 CCLS1 cDNA sequences, 960 CCLS2 cDNA sequences and 1344 ADPS cDNA sequences were evaluated by microarray analysis on Colon Chip 4, as described above. From this analysis, 275 cDNA sequences were identified that exhibited greater than 2-fold overexpression in colon tumors versus a comprehensive set of normal tissues. These sequences are set forth in SEQ ID NOs:72-348.

### Example 2

### Identification Of Additional Colon Tumor Protein cDNAs

[2902] Further analysis of microarray data revealed 3 additional clones that showed greater than 2-fold overexpression in colon tumors versus a set of normal tissues. These cDNAs are disclosed in SEQ ID NOs:349-351.

[2903] Additional sequence was obtained from subtraction clone inserts described in Example 2 above that were designated as prospective candidates for further analysis (disclosed in SEQ ID NOS:5, 26, 28, 29, 34, 41, 50, 52, 54, 60, 65, and 69). The corresponding cDNA sequences with the additional sequence of these inserts are disclosed in SEQ ID NOS:363, 354, 356, 358, 360, 362, 359, 361, 357, 352, 355, and 353, respectively. When searched against Genbank, these prospective candidate sequences showed some degree of similarity to sequences disclosed in SEQ ID NOS:364-370. The Genbank search results are summarized in Table 2.

TABLE 2
Prospective candidate sequences show some similarity to
sequences in Genbank

| SEQ ID | Clone | Description of Genbank search hits | |
|---|---|---|---|
| SEARCHED | Identifier | showing some sequence similarity | |
| 355 | 63693 | FLJ21409 fis clone COL03924 | (SEQ ID NO: 364) |
| 361 | 63663 | Human eukaryotic initiation factor 4E | (SEQ ID NO: 365) |
| 359 | 63659 | KIAA0905 | (SEQ ID NO: 366) |
| 353 | 63949 | p35 CAK1-associated protein | (SEQ ID NO: 367) |
| 357 | 63677 | L6 Human Tumore Antigen | (SEQ ID NO: 368) |
| 358 | 62294 | ARF GTPase-activating protein GIT1 | (SEQ ID NO: 369) |
| 352 | 63676 | KIAA0104 | (SEQ ID NO: 370) |

### Example 4

### Identification and Analysis of Additional Colon Tumor Protein cDNAS

[2904] 2,162 additional clones were subjected to DNA sequence analysis (disclosed herein as SEQ ID NOs:371-2,532). Of these, the cDNA clones depicted in SEQ ID NOs:371-1,452 were derived from PCR subtracted libraries CCLA1 and CCLS2. The cDNA clones depicted in SEQ ID NOs:1,453-2,532 were derived from the ADPS PCR-subtracted library.

[2905] To assess the utility of colon genes and/or antigens as immunological targets for immunothereapy in individuals with colon and/or metastatic colon cancer, and a potential diagnostic markers of colon and/or metastatic colon cancer, cDNA clones disclosed herein were further subjected to microarray expression analysis. Fifty three individual clones that showed two-fold overexpression in colon tumors comparing to normal tissues by microarray were identified by DNA sequencing and are disclosed herein as SEQ ID NOs:2,533-2,585. All 53 clones represented cDNA fragments from PCR-based subtracted cDNA libraries of colon tumors and metastatic colon tumors. Based on the combination of subraction library preparation and confirmed overexpression by microarray analysis, it was concluded that these 53 clones are over expressed in colon tumors and/or in metastatic colon tumors. These microarray expression data are presented herein as Table 3.

TABLE 3

| Element (384) | Element (96) | Ratio | Tumor Signal | Normal Signal |
|---|---|---|---|---|
| p0093r15c03 | R0359 E2 | 3.11 | 0.499 | 0.16 |
| p0091r16c23 | R0351 G12 | 3.5 | 0.148 | 0.042 |
| p0092r02c02 | R0352 D1 | 2.69 | 0.146 | 0.054 |
| p0092r13c22 | R0355 B11 | 2.02 | 0.348 | 0.172 |
| p0091r08c14 | R0349 H7 | 6.53 | 0.459 | 0.07 |
| p0093r10c12 | R0358 D6 | 2.63 | 0.265 | 0.101 |
| p0091r15c03 | R0351 E2 | 2.5 | 1.099 | 0.439 |
| p0092r04c21 | R0352 G11 | 2.88 | 0.461 | 0.16 |
| p0092r11c12 | R0354 F6 | 2.93 | 0.481 | 0.164 |
| p0091r07c13 | R0349 E7 | 2.3 | 0.108 | 0.047 |
| p0093r05c09 | R0357 A5 | 6.47 | 1.875 | 0.29 |
| p0093r06c23 | R0357 C12 | 6.65 | 1.387 | 0.209 |
| p0093r09c04 | R0358 B2 | 2.64 | 0.251 | 0.095 |
| p0092r06c04 | R0353 D2 | 2.29 | 1.42 | 0.619 |
| p0092r12c20 | R0354 H10 | 5.46 | 0.497 | 0.091 |
| p0091r06c08 | R0349 D4 | 2.68 | 0.677 | 0.252 |
| p0092r11c24 | R0354 F12 | 2.2 | 0.084 | 0.038 |
| p0093r16c19 | R0359 G10 | 3 | 0.229 | 0.076 |
| p0091r14c18 | R0351 D9 | 4.62 | 0.741 | 0.16 |
| p0092r10c19 | R0354 C10 | 2.39 | 0.045 | 0.019 |
| p0093r04c19 | R0356 G10 | 2.88 | 0.171 | 0.059 |
| p0092r09c03 | R0354 A2 | 2.51 | 0.34 | 0.136 |
| p0093r14c15 | R0359 C8 | 2.05 | 1.023 | 0.499 |
| p0093r06c11 | R0357 C6 | 2.29 | 0.332 | 0.145 |
| p0093r12c07 | R0358 G4 | 4.93 | 0.578 | 0.117 |
| p0092r15c24 | R0355 F12 | 2.22 | 0.061 | 0.027 |
| p0091r15c04 | R0351 F2 | 2.29 | 0.747 | 0.327 |
| p0091r13c20 | R0351 B10 | 2.1 | 0.051 | 0.024 |
| p0091r06c06 | R0349 D3 | 2.67 | 0.184 | 0.069 |
| p0093r05c23 | R0357 A12 | 2.95 | 0.199 | 0.067 |
| p0093r16c15 | R0359 G8 | 2.47 | 0.133 | 0.054 |
| p0092r10c20 | R0354 D10 | 2.78 | 0.128 | 0.046 |
| p0092r12c02 | R0354 H1 | 2.02 | 0.859 | 0.425 |
| p0091r12c19 | R0350 G10 | 8.76 | 0.792 | 0.09 |
| p0093r07c19 | R0357 E10 | 2.71 | 0.148 | 0.055 |
| p0093r12c11 | R0358 G6 | 2.58 | 0.244 | 0.094 |
| p0091r03c06 | R0348 F3 | 5.41 | 0.626 | 0.116 |
| p0092r14c11 | R0355 C6 | 2.39 | 0.141 | 0.059 |
| p0093r14c09 | R0359 C5 | 2.05 | 0.185 | 0.09 |
| p0091r03c12 | R0348 F6 | 2.29 | 0.164 | 0.072 |
| p0092r06c16 | R0353 D8 | 2.36 | 0.207 | 0.088 |
| p0093r01c16 | R0356 B8 | 2.39 | 0.388 | 0.162 |
| p0092r06c11 | R0353 C6 | 2.11 | 0.365 | 0.172 |
| p0091r05c14 | R0349 B7 | 6.47 | 0.861 | 0.133 |
| p0093r12c01 | R0358 G1 | 3.89 | 1.047 | 0.269 |
| p0091r05c08 | R0349 B4 | 4.86 | 0.359 | 0.074 |
| p0093r08c22 | R0357 H11 | 3.33 | 0.815 | 0.245 |
| p0092r16c19 | R0355 G10 | 2.7 | 2.19 | 0.812 |
| p0092r06c07 | R0353 C4 | 2.15 | 0.057 | 0.027 |
| p0093r16c20 | R0359 H10 | 2.16 | 0.233 | 0.108 |
| p0091r03c20 | R0348 F10 | 2.67 | 0.215 | 0.08 |
| p0091r10c20 | R0350 D10 | 2.84 | 0.161 | 0.056 |
| p0094r03c05 | R0360 E3 | 3.06 | 0.208 | 0.068 |

[2906] In subsequent analyses, additional clones were identified that showed at least two-fold overexpression by microarray in colon tumor cells as compared to colon normal cells. These clones are presented herein as Table 4.

TABLE 4

| Element (386) | Element (96) | Calculation | Ratio | Tumor Signal | Normal Signal |
|---|---|---|---|---|---|
| p0097r11c09 | R0374 E5 | Median | 2.07 | 0.165 | 0.08 |
| p0097r11c08 | R0374 F4 | Mean | 3.51 | 0.339 | 0.097 |
| p0097r12c20 | R0374 H10 | Mean | 2.83 | 0.334 | 0.118 |
| p0097r15c19 | R0375 E10 | Median | 2.7 | 0.211 | 0.078 |
| p0097r15c16 | R0375 F8 | Mean | 2.13 | 0.39 | 0.183 |
| p0097r16c14 | R0375 H7 | Mean | 2.01 | 0.139 | 0.069 |
| p0098r01c07 | R0376 A4 | Mean | 4 | 0.483 | 0.121 |
| p0098r01c22 | R0376 B11 | Median | 2.55 | 0.393 | 0.154 |
| p0098r01c24 | R0376 B12 | Mean | 2.05 | 0.298 | 0.145 |
| p0098r02c24 | R0376 D12 | Mean | 5.04 | 0.638 | 0.126 |
| p0098r03c10 | R0376 E5 | Median | 2.17 | 0.137 | 0.063 |
| p0098r04c03 | R0376 G2 | Median | 6.44 | 0.96 | 0.149 |
| p0098r06c17 | R0377 C9 | Median | 14.09 | 3.05 | 0.216 |
| p0098r06c24 | R0377 012 | Median | 2.1 | 0.241 | 0.115 |
| p0098r06c12 | R0377 06 | Median | 2.22 | 0.12 | 0.054 |
| p0098r07c22 | R0377 E11 | Mean | 2.49 | 0.17 | 0.068 |
| p0098r07c06 | R0377 E3 | Mean | 7.43 | 0.802 | 0.108 |
| p0098r08c20 | R0377 H10 | Mean | 2.77 | 0.15 | 0.054 |
| p0098r08c04 | R0377 H2 | Mean | 7.84 | 0.691 | 0.088 |
| p0098r08c16 | R0377 H8 | Median | 2.36 | 0.476 | 0.202 |
| p0098r09c07 | R0378 A4 | Mean | 2.12 | 0.369 | 0.174 |
| p0098r10c07 | R0378 C4 | Mean | 3.41 | 0.633 | 0.186 |
| p0098r10c04 | R0378 D2 | Mean | 5.57 | 0.656 | 0.118 |
| p0098r11c07 | R0378 E4 | Mean | 3.65 | 0.163 | 0.045 |
| p0098r11c10 | R0378 E5 | Mean | 2.29 | 0.437 | 0.191 |
| p0098r13c05 | R0379 A3 | Mean | 5.24 | 0.778 | 0.148 |
| p0098r13c06 | R0379 B3 | Mean | 2.21 | 0.297 | 0.135 |
| p0098r15c03 | R0379 E2 | Mean | 3.45 | 0.236 | 0.068 |
| p0098r15c24 | R0379 E12 | Median | 2.55 | 0.119 | 0.047 |
| p0098r16c22 | R0379 H11 | Median | 2.12 | 0.208 | 0.098 |
| p0099r01c19 | R0380 A10 | Median | 2.74 | 0.409 | 0.149 |
| p0099r01c22 | R0380 B11 | Median | 2.66 | 0.563 | 0.212 |
| p0099r02c03 | R0380 C2 | Median | 2.93 | 0.578 | 0.197 |
| p0099r02c07 | R0380 C4 | Mean | 2.84 | 0.297 | 0.105 |
| p0099r03c21 | R0380 E11 | Mean | 5.06 | 0.742 | 0.147 |
| p0099r03c09 | R0380 E5 | Mean | 2.05 | 0.338 | 0.165 |
| p0099r03c08 | R0380 E4 | Median | 6.45 | 1.31 | 0.203 |
| p0099r03c10 | R0380 E5 | Mean | 2.54 | 0.217 | 0.085 |
| p0099r03c14 | R0380 F7 | Mean | 2.28 | 0.11 | 0.048 |
| p0099r03c18 | R0380 F9 | Mean | 2.2 | 0.195 | 0.088 |
| p0099r05c23 | R0381 A12 | Mean | 2.04 | 0.248 | 0.122 |
| p0099r05c09 | R0381 A5 | Mean | 3.76 | 0.744 | 0.198 |
| p0099r05c20 | R0381 B10 | Mean | 4.42 | 0.115 | 0.026 |
| p0099r06c16 | R0381 D8 | Mean | 7.17 | 0.806 | 0.112 |
| p0099r07c02 | R0381 F1 | Mean | 2.52 | 0.14 | 0.056 |
| p0099r07c14 | R0381 F7 | Mean | 6.68 | 0.58 | 0.087 |
| p0099r08c19 | R0381 G10 | Median | 3 | 0.501 | 0.167 |
| p0099r08c22 | R0381 H11 | Mean | 4.99 | 0.419 | 0.084 |
| p0099r11c05 | R0382 E3 | Mean | 2.4 | 0.261 | 0.109 |
| p0099r11c24 | R0382 F12 | Mean | 2.49 | 0.232 | 0.093 |
| p0099r11c16 | R0382 F8 | Mean | 2.05 | 0.287 | 0.14 |
| p0099r12c11 | R0382 G6 | Mean | 2.22 | 0.29 | 0.131 |
| p0099r12c13 | R0382 G7 | Mean | 7.1 | 0.849 | 0.12 |
| p0099r13c16 | R0383 B8 | Median | 2.64 | 0.474 | 0.179 |
| p0099r15c21 | R0383 E11 | Mean | 2.11 | 0.317 | 0.15 |
| p0099r15c02 | R0383 F1 | Mean | 5.36 | 0.896 | 0.167 |
| p0099r16c05 | R0383 G3 | Mean | 2.75 | 0.415 | 0.151 |
| p0099r16c06 | R0383 H3 | Mean | 2.07 | 0.333 | 0.161 |
| p0100r01c17 | R0384 A9 | Median | 2.25 | 0.319 | 0.142 |
| p0100r01c04 | R0384 B2 | Mean | 6.98 | 1.341 | 0.192 |
| p0100r01c16 | R0384 B8 | Mean | 8.51 | 0.949 | 0.112 |
| p0100r03c02 | R0384 F1 | Median | 2.39 | 0.468 | 0.196 |
| p0100r06c07 | R0385 C4 | Mean | 3.21 | 0.407 | 0.127 |
| p0100r06c17 | R0385 C9 | Mean | 2.6 | 0.299 | 0.115 |
| p0100r06c12 | R0385 D6 | Mean | 2.48 | 0.271 | 0.109 |
| p0100r07c10 | R0385 E5 | Mean | 2.36 | 0.286 | 0.121 |
| p0100r10c12 | R0386 D6 | Mean | 2.47 | 0.199 | 0.081 |
| p0100r12c18 | R0386 H9 | Mean | 2.75 | 0.355 | 0.129 |
| p0100r13c20 | R0387 B10 | Mean | 2.25 | 0.266 | 0.118 |
| p0100r15c15 | R0387 E8 | Mean | 2.42 | 0.159 | 0.066 |
| p0100r15c17 | R0387 E9 | Median | 2.01 | 0.187 | 0.093 |
| p0101r01c22 | R0388 B11 | Mean | 2.09 | 0.238 | 0.114 |
| p0101r01c08 | R0388 B4 | Mean | 3.77 | 0.191 | 0.051 |
| p0101r03c08 | R0388 F4 | Median | 3.11 | 0.621 | 0.2 |
| p0101r04c11 | R0388 G6 | Mean | 2.06 | 0.119 | 0.058 |
| p0101r04c16 | R0388 H8 | Mean | 2.02 | 0.129 | 0.064 |
| p0101r05c07 | R0389 A4 | Mean | 2.05 | 0.228 | 0.111 |
| p0101r05c08 | R0389 B4 | Mean | 5.08 | 0.962 | 0.189 |
| p0101r06c05 | R0389 C3 | Median | 2.04 | 0.319 | 0.157 |
| p0101r06c22 | R0389 D11 | Mean | 2.21 | 0.307 | 0.139 |
| p0101r07c01 | R0389 E1 | Median | 3.02 | 0.339 | 0.112 |
| p0101r07c15 | R0389 E8 | Median | 2.54 | 0.213 | 0.084 |
| p0101r08c20 | R0389 H10 | Median | 2.3 | 0.202 | 0.088 |
| p0101r08c24 | R0389 H12 | Mean | 2.28 | 0.311 | 0.136 |
| p0101r09c24 | R0390 B12 | Mean | 4.93 | 0.635 | 0.129 |
| p0101r11c23 | R0390 E12 | Mean | 3.97 | 0.281 | 0.071 |
| p0101r11c14 | R0390 F7 | Median | 2.26 | 0.332 | 0.147 |
| p0101r11c16 | R0390 F8 | Mean | 3.77 | 0.259 | 0.069 |
| p0101r12c11 | R0390 G6 | Mean | 4.2 | 0.39 | 0.093 |
| p0101r13c02 | R0391 B1 | Mean | 5.03 | 0.742 | 0.148 |
| p0101r13c16 | R0391 B8 | Mean | 2.69 | 0.335 | 0.125 |
| p0101r15c06 | R0391 F3 | Median | 2.3 | 0.194 | 0.085 |
| p0102r01c17 | R0392 A9 | Mean | 2.03 | 0.286 | 0.141 |
| p0102r01c08 | R0392 B4 | Mean | 2.54 | 0.23 | 0.091 |
| p0102r01c12 | R0392 B6 | Mean | 2.11 | 0.342 | 0.162 |
| p0102r01c18 | R0392 B9 | Mean | 4.29 | 0.833 | 0.194 |
| p0102r02c19 | R0392 C10 | Median | 2.08 | 0.295 | 0.142 |
| p0102r03c13 | R0392 E7 | Mean | 3.67 | 0.33 | 0.09 |
| p0102r03c10 | R0392 F5 | Mean | 3.06 | 0.446 | 0.146 |
| p0102r04c01 | R0392 G1 | Median | 2.57 | 0.191 | 0.074 |
| p0102r04c11 | R0392 G6 | Median | 4.85 | 0.986 | 0.204 |
| p0102r05c08 | R0393 B4 | Mean | 2.41 | 0.361 | 0.149 |
| p0102r05c16 | R0393 B8 | Mean | 3.77 | 0.439 | 0.116 |
| p0102r06c09 | R0393 C5 | Mean | 2.05 | 0.37 | 0.181 |
| p0102r08c15 | R0393 G8 | Median | 2.05 | 0.149 | 0.073 |
| p0102r08c04 | R0393 H2 | Mean | 3.68 | 0.54 | 0.147 |
| p0102r08c08 | R0393 H4 | Mean | 3.4 | 0.378 | 0.111 |
| p0102r08c10 | R0393 H5 | Mean | 7.64 | 0.672 | 0.088 |
| p0102r08c12 | R0393 H6 | Mean | 2.56 | 0.357 | 0.139 |
| p0102r10c19 | R0394 C10 | Mean | 2.28 | 0.332 | 0.145 |
| p0102r10c04 | R0394 D2 | Median | 3.46 | 0.594 | 0.171 |
| p0102r10c08 | R0394 D4 | Mean | 5 | 0.715 | 0.143 |
| p0102r11c21 | R0394 E11 | Mean | 4.38 | 0.769 | 0.175 |
| p0102r11c11 | R0394 E6 | Median | 6.5 | 0.46 | 0.071 |
| p0102r11c14 | R0394 F7 | Mean | 6.42 | 0.948 | 0.148 |
| p0102r12c06 | R0394 H3 | Mean | 2.65 | 0.334 | 0.126 |
| p0102r13c12 | R0395 B6 | Median | 2.15 | 0.136 | 0.063 |
| p0102r14c09 | R0395 C5 | Mean | 2.64 | 0.519 | 0.196 |
| p0102r15c08 | R0395 F4 | Mean | 5.44 | 0.59 | 0.108 |
| p0102r15c18 | R0395 F9 | Median | 5.86 | 0.931 | 0.159 |
| p0102r16c24 | R0395 H12 | Mean | 7.7 | 0.821 | 0.107 |
| p0102r16c04 | R0395 H2 | Median | 2.11 | 0.155 | 0.073 |
| p0103r02c23 | R0396 C12 | Mean | 2.34 | 0.213 | 0.091 |
| p0103r02c03 | R0396 C2 | Mean | 3.09 | 0.541 | 0.175 |
| p0103r02c20 | R0396 D10 | Median | 2.4 | 0.214 | 0.089 |
| p0103r03c19 | R0396 E10 | Mean | 2.19 | 0.15 | 0.069 |
| p0103r03c23 | R0396 E12 | Mean | 3.44 | 0.595 | 0.173 |
| p0103r03c05 | R0396 E3 | Mean | 4.39 | 0.726 | 0.165 |
| p0103r04c22 | R0396 H11 | Mean | 5.37 | 0.832 | 0.155 |
| p0103r06c01 | R0397 C1 | Mean | 2.64 | 0.384 | 0.145 |
| p0103r08c17 | R0397 G9 | Mean | 3.57 | 0.57 | 0.16 |
| p0103r09c09 | R0398 A5 | Mean | 2.81 | 0.297 | 0.106 |
| p0103r09c06 | R0398 B3 | Mean | 4.28 | 0.791 | 0.185 |
| p0103r10c21 | R0398 C11 | Mean | 2.91 | 0.36 | 0.124 |
| p0103r11c09 | R0398 E5 | Mean | 10.75 | 1.524 | 0.142 |
| p0103r12c04 | R0398 H2 | Mean | 5.51 | 0.765 | 0.139 |
| p0103r14c23 | R0399 C12 | Mean | 2.8 | 0.295 | 0.105 |
| p0103r14c06 | R0399 D3 | Median | 2.07 | 0.275 | 0.133 |
| p0103r14c16 | R0399 D8 | Mean | 6.45 | 1.184 | 0.184 |
| p0103r15c21 | R0399 E11 | Mean | 3.01 | 0.6 | 0.2 |
| p0103r15c03 | R0399 E2 | Median | 2.1 | 0.197 | 0.094 |
| p0103r15c05 | R0399 E3 | Mean | 2.62 | 0.325 | 0.124 |
| p0103r15c12 | R0399 F6 | Mean | 2.24 | 0.296 | 0.132 |
| p0103r16c21 | R0399 G11 | Median | 2.12 | 0.264 | 0.124 |
| p0103r16c20 | R0399 H10 | Median | 6.23 | 1.42 | 0.228 |
| p0104r01c20 | R0400 B10 | Mean | 2.29 | 0.259 | 0.113 |
| p0104r01c12 | R0400 B6 | Mean | 3.29 | 0.461 | 0.14 |
| p0104r01c16 | R0400 B8 | Mean | 2.75 | 0.244 | 0.089 |
| p0104r02c14 | R0400 D7 | Mean | 2.03 | 0.41 | 0.201 |
| p0104r03c16 | R0400 F8 | Median | 2.03 | 0.246 | 0.121 |
| p0104r04c21 | R0400 G11 | Mean | 2.67 | 0.417 | 0.156 |
| p0104r04c16 | R0400 H8 | Mean | 8.29 | 1.275 | 0.154 |
| p0104r04c18 | R0400 H9 | Median | 2.05 | 0.208 | 0.102 |
| p0104r13c21 | R0403 A11 | Mean | 2.11 | 0.149 | 0.07 |
| p0104r13c05 | R0403 A3 | Median | 18.7 | 2.15 | 0.115 |
| p0104r13c07 | R0403 A4 | Mean | 3.15 | 0.585 | 0.186 |
| p0104r14c21 | R0403 C11 | Mean | 2.1 | 0.299 | 0.143 |
| p0104r15c05 | R0403 E3 | Median | 2.07 | 0.208 | 0.101 |
| p0104r15c06 | R0403 F3 | Mean | 2.57 | 0.421 | 0.164 |
| p0104r16c22 | R0403 H11 | Mean | 2.14 | 0.169 | 0.079 |
| p0104r16c24 | R0403 H12 | Mean | 2.54 | 0.503 | 0.198 |
| p0105r01c03 | R0404 A2 | Median | 10.31 | 0.687 | 0.067 |
| p0105r02c02 | R0404 D1 | Median | 3.45 | 0.303 | 0.088 |
| p0105r02c04 | R0404 D2 | Median | 2.57 | 0.112 | 0.044 |
| p0105r02c12 | R0404 D6 | Median | 2.33 | 0.1 | 0.043 |
| p0105r02c14 | R0404 D7 | Median | 2.41 | 0.269 | 0.112 |
| p0105r02c18 | R0404 D9 | Median | 2.96 | 0.287 | 0.097 |
| p0105r03c09 | R0404 E5 | Median | 2.45 | 0.319 | 0.13 |
| p0105r04c17 | R0404 G9 | Median | 4.67 | 0.296 | 0.063 |
| p0105r05c04 | R0405 B2 | Median | 2.37 | 0.258 | 0.109 |
| p0105r06c23 | R0405 C12 | Median | 2.01 | 0.114 | 0.057 |
| p0105r06c11 | R0405 C6 | Median | 7.24 | 0.194 | 0.027 |
| p0105r06c13 | R0405 C7 | Median | 2.37 | 0.158 | 0.067 |
| p0105r06c15 | R0405 C8 | Median | 7.17 | 0.21 | 0.029 |
| p0105r06c06 | R0405 D3 | Median | 2.09 | 0.262 | 0.126 |
| p0105r06c08 | R0405 04 | Median | 3.17 | 0.214 | 0.067 |
| p0105r07c22 | R0405 E11 | Median | 3.78 | 0.367 | 0.097 |

### Example 5

### Analysis of mRNA Expression Profiles of Colon Tumor Protein cDNAs Using Real-Time PCR

[2907] Four colon chip 4a clones, referred to as C1466P (SEQ ID NOs:854, 1346, 2586, and 2593), C1465P (SEQ ID NOs:1469, 1821, 149, 2515, 2417, 2587, and 2592), C1446P (SEQ ID NOs:188, 2183, 2415, 1554, 2588, and 2591), and C1444P (SEQ ID NOs:139, 142, 1433, 1788, 1810, 1651, 1875, 2589, and 2590) were further analyzed by real-time PCR. The first-strand cDNA used in the quantitative real-time PCR was synthesized from 20 μg of total RNA that was treated with DNase I (Amplification Grade, Gibco BRL Life Technology, Gaithersburg, Md.), using Superscript Reverse Transcriptase (RT) (Gibco BRL Life Technology, Gaithersburg, Md.). Real-time PCR was performed with a GeneAmp™ 5700 sequence detection system (PE Biosystems, Foster City, Calif.). The 5700 system uses SYBR™ green, a fluorescent dye that only intercalates into double stranded DNA, and a set of gene-specific forward and reverse primers. The increase in fluorescence was monitored during the whole amplification process. The optimal concentration of primers was determined using a checkerboard approach and a pool of cDNAs from breast tumors was used in this process. The PCR reaction was performed in 25 μl volumes that included 2.5 μl of SYBR green buffer, 2 μl of cDNA template and 2.5 μl each of the forward and reverse primers for the gene of interest. The cDNAs used for RT reactions were diluted 1:10 for each gene of interest and 1:100 for the β-actin control. In order to quantitate the amount of specific cDNA (and hence initial mRNA) in the sample, a standard curve was generated for each run using the plasmid DNA containing the gene of interest. Standard curves were generated using the Ct values determined in the real-time PCR which were related to the initial cDNA concentration used in the assay. Standard dilution ranging from 20-2×10⁶ copies of the gene of interest was used for this purpose. In addition, a standard curve was generated for β-actin ranging from 200 fg-2000 fg. This enabled standardization of the initial RNA content of a tissue sample to the amount of β-actin for comparison purposes. The mean copy number for each group of tissues tested was normalized to a constant amount of β-actin, allowing the evaluation of the over-expression levels seen with each of the genes.

[2908] Table 5 summarizes the real-time expression ratios and the 1-plate real time PCR data (colon tumors versus normal tissues) for the above-mentioned clones. Also included in Table 5 are the Genbank search results and the library of origin for each clone. Three PCR subtraction isolates were found for the C1444P candidate gene. The full length cDNA (SEQ ID NOs:2586-2589) and protein sequences (SEQ ID NOs:2590-2593) for each candidate are disclosed herein. Real-time PCR analysis shows that these candidate genes are overexpressed in most colon tumors when compared to normal colon and other normal tissues.

TABLE 5

| SEQ ID NO | | | | | | |
|---|---|---|---|---|---|---|
| FOR FL | ELEMENT | | | | REAL TIME RESULTS, 1 PLATE | CANDIDATE |
| cDNA/PRO: | (96) | RATIO | LIBRARY | GENBANK | PANEL* | NAME |
| 2589/2590 | R0391 E5 | 6.65 | ADPS | No match | CT overexpression, low/no | C1444P |
| | | | | | CN, high pancreas | |
| 2589/2590 | R0391 H1 | 2.83 | ADPS | Homo sapiens claudin-2 | CT overexpression, low/no | C1444P |
| | | | | mRNA, complete cds | CN, high pancreas, liver | |
| 2589/2590 | R0394 E10 | 3.56 | ADPS | Claudin 2 | CT overexpression, low/no | C1444P |
| | | | | | CN, high pancreas, liver | |
| 2587/2592 | R0392 A9 | 4.74 | ADPS | Human homeobox protein | Tissue specific, all CT and | C1465P |
| | | | | Cdx1 mRNA, complete cds | CN. Clean normals | C1465P |
| 2586/2593 | R0385 F5 | 9.07 | CCLS2 | Human DNA topoisomerase | Colon tumor overexpressed; | C1466P |
| | | | | II (top2) mRNA, complete | CN, esoph, low in all others | |
| | | | | cds | | |

*CT: colon tumor;
CN: colon normal;
esoph: esophagus.

### Example 6

### Identification and Analysis of Additional Colon Tumor Protein cDNAs

[2909] Further analysis of microarray data from the CTLS 1 subtraction library described in Example 1 revealed 8 additional clones that showed greater than 2-fold overexpression in colon tumors versus a set of normal tissues including normal colon. These cDNAs are disclosed in SEQ ID NOs:2594-2602. The sequences were searched against Genbank and the results are shown in Table 6. The probes used for the microarray analysis are listed in Table 7.

[2910] One clone, (element RO372 A11, C638S) was further analyzed using real-time PCR as described in Example 5. The real-time analysis showed that this gene is overexpressed in 75% of colon tumors but has low expression in normal colon tissue. Overexpression was also observed in skeletal muscle and adrenal gland (see Table 6). When searched against Genbank, C638S showed similarity to H. sapiens hiwi mRNA. The full-length cDNA and protein sequence for C638S are disclosed in SEQ ID NOs:2602 and 2603, respectively.

TABLE 6

| SEQ ID | | | | | | | REAL TIME PCR NORMAL |
|---|---|---|---|---|---|---|---|
| NO: | GENBANK IDENTITY | ELEMENT | RATIO | NAME | CT | CN | TISSUE EXPRESSION |
| 2600 | Homo sapiens hiwi mRNA | R0372 A11 | 2.13 | C638S | 75% | Low | Low levels in skeletal |
| | | | | | | | muscle and adrenal gland |
| 2601 | Homo sapiens cDNA: FLJ21212 | R0373 A2 | 2.11 | | | | |
| | fis, clone COL00502 | | | | | | |
| 2596 | Homo sapiens ribosomal protein | R0366 G6 | 2.03 | | | | |
| | S4, X-linked (RPS4X) mRNA | | | | | | |
| 2595 | Human carbohydrate | R0364 B8 | 2.32 | | | | |
| | sulfotransferase 4 | | | | | | |
| 2598 | Homo sapiens H2A histone | R0369 H4 | 2.01 | | | | |
| | family, member Z (H2AFZ) | | | | | | |
| | mRNA | | | | | | |
| 2594 | Homo sapiens hypothetical | R0363 E1 | 2.65 | | | | |
| | protein (HSPC236), mRNA | | | | | | |
| 2604 | Human proteasome (prosome, | R0362 E12 | 2.03 | | | | |
| | macropain) subunit, alpha type, 5 | | | | | | |
| 2599 | Homo sapiens S100 calcium- | R0370 B6 | 2.44 | | | | |
| | binding protein A6 (calcyclin) | | | | | | |
| 2597 | Serine protease inhibitor, Kunitz | R0366 B10 | 2.44 | | | | |
| | type, 2 | | | | | | |

[2911] TABLE 7

| PROBE | CY3 | | CY5 | CY5 |
|---|---|---|---|---|
| PAIR | PROBE | CY3 TISSUE | PROBE | TISSUE |
| 1 | 1016A | Colon Tumor, Duke's D | SPACT94 | Bone |
| | | | | Marrow |
| 2 | 1000A | Colon Tumor, Duke's A | 1003a | Normal |
| | | | | Colon |
| 3 | 647A | Colon Tumor, Duke's A | SPACT87 | Heart N |
| 4 | 645A | Colon Tumor, Duke's A | SPACT103 | Lung N |
| 5 | 1026A | Colon Tumor, Duke's B | 1065B | Aorta N |
| 6 | 633A | Colon Tumor, Duke's B | 119A | Kidney N |
| 7 | 235A | Colon Tumor, Duke's B | SPACT97 | Salivary |
| | | | | Gland N |
| 8 | 653A | Colon Tumor, Duke's C | 490/610C | Skin N |
| 9 | 1018A | Colon Tumor, Duke's C | SPACT85 | Brain N |
| 10 | 863A2 | Colon Tumor, Duke's C | SPACT89 | Pancreas N |
| 11 | 240A | Colon Tumor, Duke's C | SPACT93 | Trachea N |
| 12 | 659A | Colon Tumor, Duke's D | 1195A | PBMA |
| | | | | Resting |
| 13 | 672A | Colon Tumor, Duke's D | SPACT104 | Lymph |
| | | | | Node N |

### Example 7

### Identification and Analysis of an Additional Colon Tumor Antigen

[2912] Clone R0400 B8 originated from the ADPS PCR subtraction library, in which colon tumor was subtracted with normal colon as well as other tissues according to the usual protocol as described in Example 1. The ADPS subtraction was performed using Duke stage A and Duke stage D colon adenocarcinoma samples. This clone was identified as having greater than 2-fold overexpression in colon tumors as compared to normal tissue by microarray analysis. The sequence was searched against Genbank and showed some degree of similarity to a known gene referred to as small inducible cytokine subfamily A (SCYA20) or MIP3a. The full-length cDNA and protein sequences for this gene are disclosed in SEQ ID NOs:2605 and 2606, respectively.

[2913] From the foregoing it will be appreciated that, although specific embodiments of the invention have been described herein for purposes of illustration, various modifications may be made without deviating from the spirit and scope of the invention. Accordingly, the invention is not limited except as by the appended claims.

The application's sequence listing, which the Patent Office published only in electronic form, follows.

SEQUENCE LISTING (2606 sequences)

SEQ ID NO: 1 - DNA, 1278 bp, Homo sapiens
ggcgtagcagagtggtcgttgtctttctaggtctcagccggtcgtcgcgacgttcgcccgctcgctctgaggctcctgaagccgaaaccagctagactttcctccttcccgcctgcctgtagcggcgttgttgccactccgccaccatgttcgaggcgcgcctggtccagggctccatcctcaagaaggtgttggaggcactcaaggacctcatcaacgaggcctgctgggatattagctccagcggtgtaaacctgcagagcatggactcgtcccacgtctctttggtgcagctcaccctgcggtctgagggcttcgacacctaccgctgcgaccgcaacctggccatgggcgtgaacctcaccagtatgtccaaaatactaaaatgcgccggcaatgaagatatcattacactaagggccgaagataacgcggataccttggcgctagtatttgaagcaccaaaccaggagaaagtttcagactatgaaatgaagttgatggatttagatgttgaacaacttggaattccagaacaggagtacacgctgtgtagtaaagatgccttctggtgaatttgcacgtatatgccgagatctcagccatattggagatgctgttgtaatttcctgtgcaaaagacggagtgaaattttctgcaagtggagaacttggaaatggaaacattaaattgtcacagacaagtaatgtcgataaagaggaggaagctgttaccatagagatgaatgaaccagttcaactaacttttgcactgaggtacctgaacttctttacaaaagccactccactctcttcaacggtgacactcagtatgtctgcagatgtaccccttgttgtagagtataaaattgcggatatgggacacttaaaatactacttggctcccaagatcgaggatgaagaaggatcttaggcattcttaaaattcaagaaaataaaactaagctctttgagaactgcttctaagatgccagcatatactgaagtcttttctgtcaccaaatttgtacctctaagtacatatgtagatattgttttctgtaaataacctatttttttctctattctctgcaatttgtttaaagaataaagtccaaagtcagatctggtctagttaacctagaagtatttttgtctcttagaaatacttgtgatttttataatacaaaagggtcttgactctaaatgcagttttaagaattgtttttgaatttaaataaagttacttgaatttcaaacatcaaaaaaaaaaaaaaaa

SEQ ID NO: 2 - DNA, 338 bp, Homo sapiens
ctttgtttaaaataagatgcttcagcaaaagtcattctctctttaaccatataatttaaaaactcctcttcacgattgatagcaaaatcagaaacgttagggcaccagtgagttgaaaaaactggtcttaagttggaaaaactattattaataatattatcctatccatccatatctattgaaattgtacaggtccataatttcattttaattaattataggaaagaagaaaagataatacccatttgttctatcacccctctccctatcattaactatcaaataaataaataaaagcaatctgatttccaacgtggtaaaaaaaaaaaaaaaaaaaa

SEQ ID NO: 3 - DNA, 501 bp, Homo sapiens
gccatggtcggcagaagagcactgatcgtactggctcactcagagaggacgtccttcaactatgccatgaaggaggctgctgcagcggctttgaagaagaaaggatgggaggtggtggagtcggacctctatgccatgaacttcaatcccatcatttccagaaaggacatcacaggtaaactgaaggaccctgcgaactttcagtatcctgccgagtctgttctggcttataaagaaggccatctgagcccagatattgtggctgaacaaaagaagctggaagccgcakaccttgtgatattccagttccccctgcagtggtttggagtccctgccattctgaaaggctggtttgagcgagtgttcataggagagtkkgcttacacttacgctgccatgtatgacaaaggacccttccggagtaagaaggcagtgctttccatcaccactggtggcagtggctccatgtactctctgcaagggatccacggggacatgaat

SEQ ID NO: 4 - DNA, 421 bp, Homo sapiens
  misc_feature 20, 41, 46: n = A,T,C or G
tcaagacaggccccatgaantctgactgcactgggatgganaaatnaatttcttcccactgaaggaaactctttctcattcgcagccaagacgggagtgccactgttcctctcttcactcctgagatactgcttctggaagcgggtgtcacttcctctctagtacctcttctcttctctgaagtgtgtgactatctcctagtgtttaaatttggcagttactcgccatgtatgtcagcatagaaaaggaaatgtttttaccttatctcctgtatgtatgatagaacttaaaagaaatgtgcatttgttttcatagccccagcagagaaaatcctcttcatagattaaatgtgctgctgtggacaggagggaaaaaaaaccctctacatattgaaaggcaccaaatgtaatatctgacactg

SEQ ID NO: 5 - DNA, 521 bp, Homo sapiens
cattttcccagcatttgattctgtacgcaaacatttctgcaagcagggttttggcagttcagaattatgacgaagaacaacggagtaaagggaaatactcctcaaactagtgccaaaataaagccggaattttacattttagagcaatgcagtacctaccagactatttttctgtgagcattctaactgaaaaaccaaacctctttccagtgaaaatatttatgattttaattttatactgttttatttcacgttcagtgttatacggagttgatttgtgcagtcacaaatcatgacgttgccacgatgtatatcatttatgttgacaggaaacatagttccaggatctgagatcgaaaaggcaactttaattggcattagaatttttaaaaatgtgatttgatgtagatgctacttttatcttaaaacacaattaaaatgtcaaaagttacttaaaagtaccatacctcctaaatatggagcaaggtttctcaacctccgcaccattaactttgttggtg

SEQ ID NO: 6 - DNA, 494 bp, Homo sapiens
tgaacattggtaaaaaattatatgagggtaaaacaaaagaagtctacgaattgttagacagtccaggaaaagtcctcctgcagtccaaggaccagattacagcaggaaatgcagctagaaaaaaccacctggaaggaaaagctgcaatctcaaatwaaatcaccagttgtatttttcagttattacaggaagcaggtattaaaactgccttcaccagaaaatgtggggagacagctttcattgcaccgcagtgtgaaatgattccaattgaatgggtttgcagaagaatagcaactggttcttttctcaaaagaaatcctggtgtcaasgaaggatataagttttacccacctaaagtggagttgtyyttcaaggatgatgccaataatgacccacagtggtctgaggaacagctgattgctgcaaaattttgctttgctggacttcttataggccacactgaagtggatatcatgagtcatgctacacaggct

SEQ ID NO: 7 - DNA, 501 bp, Homo sapiens
atggggcacctgtctagatcttgtcctgataatcccaaaggactctatgctgatggtggcggttgcaaactttgtggctctgtggaacatttaaagaaagattgccctgaaagtcagaattcagagcgaatggtcacagttggtcgctgggcaaagggaatgagtgcagactatgaagaaattttggatgtacctaaaccgcaaaaacccaaaacaaaaatacctaaagttgttaatttttgataacagctagcactatcatgagttactacctcattgttactttctaaaccaggcccgcttcacgagttagagttgagctcccctgtagccaggactatgctgtagatatcagtatgatctgggtgtggccaaaaacaattttctttattctgtctatcaaatagtacttctaccactgtttggagaaaattgaagaaaagaataagatgattaaatgaattctctaaaagaacatattttaagagacagaacttagac

SEQ ID NO: 8 - DNA, 401 bp, Homo sapiens
atgggtcctagacttcccagggcaagaggaagaccctgccattccacagccccttcctctgccaggtgcttggctctctgagagcaaacaggaacactakagaccaaaaaggggacaaaggagaagggctgagcccaccttcttgctcctacccttggtgcctaatgctgtgtgatgcacctgcagggtgtgtgctagcctctgtgccccgtccttgagccasgtcaaggtgggggcaggctgggccctgcatttctggggcaggaacatagggtgaaagggacagatagatgcacgtccattctgcacctcttggctcgggtgcagagttcaccctgtgccctccgttataaagtccctcccccagccctgtcatgtgccttgggctcctcctgccctcc

SEQ ID NO: 9 - DNA, 361 bp, Homo sapiens
  misc_feature 333: n = A,T,C or G
acacggtgctcacgcctgacttcctgaaccgctgccgcatgcatgccatctccggctggcaggccttctttcccatgcatttccaagccttccacccagctgtggccccaccacaagggcctgggcccccagagctgggccgtgacactggccgctttgatcgccaggcagccagcgaggcctgcttctacaactccgactacgtggcagcccgtgggcgcctggcggcagcctcagaacaagaagaggagctgctggagagcctggatgtgtacgagctgttcctccacttctccagtctgcatgtgctgcgggcggtggagccggcgctgntgcagcgctaccgggcccagacgtgcaa

SEQ ID NO: 10 - DNA, 545 bp, Homo sapiens
agctgtcggctggaaggaactggtctgctcacacttgctggcttgcgcatcaggactggctttatctcctgactcacggtgcaaaggtgcactctgcgaacgttaagtccgtccccagcgcttggaatcctacggcccccacagccggatcccctcagccttccaggtcctcaactcccgcggacgctgaacaatggcctccatggggctacaggtaatgggcatcgcgctggccgtcctgggctggctggccgtcatgctgtgctgcgcgctgcccatgtggcgcgtgacggccttcatcggcagcaacattgtcacctcgcagaccatctgggagggcctatggatgaactgcgtggtgcagagcaccggccagatgcagtgcaaggtgtacgactcgctgctggcactgccgcaggacctgcaggcggcccgcgccctcgtcatcatcagcatcatcgtggctgctctgggcgtgctgctgtccgtggtggggggcaagtgtaccaactgcctggaggatgaaagcgccaaggccaagacca

SEQ ID NO: 11 - DNA, 421 bp, Homo sapiens
ggtctgagagacagaggcagcgtgtttgagctgctggtgcggtggtcagcgcgatgcccaaggccaagggcaaaacccggaggcagaagtttggttacagtgtcaaccgaaagcgtctgaaccggaatgctcgacggaaggcagcgccgcggatcgaatgctcccacatccgacatgcctgggaccacgctaaatcggtacggcagaacctggccgagatggggttggctgtggaccccaacagggcggtgcccctccgtaagagaaaggtgaaggccatggaggtggacatagaggagaggcctaaagagcttgtacggaagccctatgtgctgaatgacctggaggcagaagccagccttccagaaaagaaaggaaatactctgtctcgggacctcattgactatgtacgctacatggt

SEQ ID NO: 12 - DNA, 296 bp, Homo sapiens
  misc_feature 238: n = A,T,C or G
attatgtttttgtatacctttttttgtaagccatttaaaaaatacaggctttaaacatactcttggaagtgtataaacagatactgtgtctgcttgttaatctaagatgtctgtccgaaaaggtgcttgcttggtcttgctcccttataatgccggtacacccacgctggagactagtagaaagcatgttgtcagacgtgtttagttctttttttttccttaccaacttatgtgttgntatttattttctgtgaatctttggaaggattaaacccacgtggtttttctatcagaaa

SEQ ID NO: 13 - DNA, 401 bp, Homo sapiens
gcgcctaatctcaggtggtccacccgagaccccttgagcaccaaccctagtcccccgcgcggccccttattcgctccgacaagatgaaagaaacaatcatgaaccaggaaaaactcgccaaactgcaggcacaagtgcgcattggtgggaaaggaactgctcgcagaaagaagaaggtggttcatagaacagccacagcagatgacaaaaaacttcagttctccttaaagaagttaggggtaaacaatatctctggtattgaagaggtgaatatgtttacaaaccaaggaacagtgatccactttaacaaccctaaagttcaggcatctctggcagcgaacactttcaccattacaggccatgctgagacaaagcagcttgacagaaatgctacccagcat

SEQ ID NO: 14 - DNA, 401 bp, Homo sapiens
  misc_feature 388: n = A,T,C or G
ccaacggcctgcagagcaacatgcccaagttttattgtgactactgcgatacatacctcacccatgactctccatctgtgagaaagacacactgcagtggaaggaaacacaaagagaatgtgaaagactattatcagaaatggatggaagagcaggctcagagcctgattgacaaaacaacggctgcatttcaacaaggaaagatacctcctactccattctctgctcctcctcctgcaggggcgatgataccacctccccccagccttccgggtcctcctcgccctggtatgatgccagcaccccatatggggggccctcccatgatgccaatgatgggccctcctcctcctgggatgatgccagtgggacctgctcctggaatgangccgcccatgggg

SEQ ID NO: 15 - DNA, 351 bp, Homo sapiens
gtgctagtttctctaagccatccagtgccatcctcgtcgctgcagcgacacacgctctcgccgccgccatgactgagcagatgacccttcgtggcaccctcaagggccacaacggctgggtaacccagatcgctactaccccgcagttcccggacatgatcctctccgcctctcgagataagaccatcatcatgtggaaactgaccagggatgagaccaactatggaattccacagcgtgctctgcggggtcactcccactttgttagtgatgtggttatctcctcagatggccagtttgccctctcaggctcctgggatggaacccttgcgcctctgggatcttacaacg

SEQ ID NO: 16 - DNA, 431 bp, Homo sapiens
gagccgaaacaccggtaggagcggggaggtgggtactacttaaccgtctccagccttggtctgagtggactgtttctgcagcgaccatgccccgtaaaggcacccagccctccactgcccggcgcagagaggaagggccgccgccgccgtcccctgacggcgccagcagcgacgcggagcctgagccgccgtccggccgcacggagagcccagccaccgccgcagagactgcaagtgaggaacttgataatagaagtttagaagagattttgaacagcattcctcctcccccgcctccagcaatgaccaatgaagctggagctcctcggcttatgataactcatattgtaaaccasaacttcaaatcctatgctggggagaaaattctgggacctttccataagcgcttttcctgtattatcgggccaaat

SEQ ID NO: 17 - DNA, 421 bp, Homo sapiens
ccaggttggacgatcctacgtgatgatttcatgatgggagcatctatgaaagactgggacaaggaaagtgatgggccagatgacagcagaccagaatctgcaagtgactctgatacataaagcatcataggaaatacaattgcagtcgttttattttttctagaaaaatatgtcatcctctgatagttggggaattataaggataccatttgtaagaaagccaaaagacttttgccagatttcatatttccccttttcatgtacactttatatatacttcattaaaattatattttaaacccttgtataattttaagcattgttcctcagaacatttgtaaaaggatatatttctgcttgaccagcgagatgtgcattttgccaggatcatattggtcatgtctattggtgtattatttca

SEQ ID NO: 18 - DNA, 451 bp, Homo sapiens
cagagaggtggttttcttcaatcagtacaaagtactgagacaatggttagggttgttttcttaattcttttcctggtagggcaacaagaaccatttccaatctagaggaaagctccccagcattgcttgctcctgggcaaacattgctcttgagttaagtgacctaattcccctgggagacatacgcatcaactgtggaggtccgaggggatgagaagggatacccaccacctttcaagggtcacaagctcactctctgacaagtcagaatagggacactgcttctatccctccaatggagagattctggcaacctttgaacagcccagagcttgcaacctagcctcacccaagaagactggaaagagacatatctctcagctttttcaggaggcgtgcctgggaatccaggaactttttgatgctaattagaaggcctggactaaaaatg

SEQ ID NO: 19 - DNA, 401 bp, Homo sapiens
  misc_feature 390, 392, 393: n = A,T,C or G
ccagttgacatttggagtataggcaccatatttgctgaactagcaactaagaaaccacttttccatggggattcagaaattgatcaactcttcaggattttcagagctttgggcactcccaataatgaagtgtggccagaagtggaatctttacaggactataagaatacatttcccaaatggaaaccaggaagcctagcatcccatgtcaaaaacttggatgaaaatggcttggatttgctctcgaaaatgttaatctatgatccagccaaacgaatttctggcaaaatggcactgaatcatccatattttaatgatttggacaatcagattaagaagatgtagctttctgacaaaaagtttccatatgttatgtcaacagatagttgngnntttattgt

SEQ ID NO: 20 - DNA, 401 bp, Homo sapiens
aataggttggaccttttaaagctgaagagtgttgtcactagcatttttggtgtgaaaaatacagagctggctgtcttccatgatgaaacagaaatacaaaaccaaactgacttactgagtcttagtggaaaaacactttgtgtgactgcaggatcggctccctctctgatcaacagttctagtactcttctttgtcagtatatcaacctacagctcctgaatgcagagccacaagagtgtttaatggggacagtgggcactctcctgcttgaaaacccacttgggcagaatggactcacccaccaaggtcttctgtatgaagcagccaaggtgtttggccttcggagcaggaagctaaagctgtttctgaatgagacccaaacgcaggaaattacagaaga

SEQ ID NO: 21 - DNA, 439 bp, Homo sapiens
  misc_feature 424: n = A,T,C or G
cctggactcggccgcccctgtggtgtgaggcgcgtgttcgggctcttgccgtccccgcacccgcaccgcggttactggcttgcggtccgccgttcgacaaccagcccttgggtccccgcccgccacggacatgccgcgcgtctacataggacgcctgagctacaacgtccgggagaaggacatccagcgctttttcagtggctatggccgcctcctcgaagtagacctcaaaaatgggtacggcttcgtggagttcgaggactcccgcgacgccgacgacgccgtttacgagctgaacggcaaggagctctgcggcgagcgcgtgatcgtagagcacgcccggggcccgcgtcgcgatcgcgacggctacagctacggaagccgcagtggtggaggtggatacagcagtcggagaacatttggnagagacaaatacgga

SEQ ID NO: 22 - DNA, 511 bp, Homo sapiens
caataactacaattttaaaagttactagaaaggctcaatactagatttgagatggcagaagaaagaatcagcaaacctgcagattgatagaggatatgcaatctgaaacaaaaagtttgaagaaaaagtgttcttcacactatgtacacaaaaattaactcaaaatggatcatagacctaaatacaagcaaaaactgtaaaacttacaaaaaatgtaagtatttgtgataattctctagacaaagctttcatagctgtgacacctaaaacaaaaaagtgcaatagataatttgttttaaaagacagcgtttttattacaggaggttgtaaaactagtctgttttatctgtttcagattaatctcaacttaatttcagtaatgaaaaatttgctctatatgccttcattctgcccatgctgttattgtcacaaactacatctttataataattatatgtccatcaacatagttttataattacgcagttttaaaaatcaggagggaagaaca

SEQ ID NO: 23 - DNA, 491 bp, Homo sapiens
ctccgagccacctctgctgcgcaccgcagcctcggacctacagcccaggatactttgggacttgccggcgctcagaaacgcgcccagacggcccctccaccttttgtttgcctagggtcgccgagagcgcccggagggaaccgcctggccttcggggaccaccaattttgtctggaaccaccctcccggcgtatcctactccctgtgccgcgaggccatcgcttcactggaggggtcgatttgtgtgtagtttggtgacaagatttgcattcacctggcccaaaccctttttgtctctttgggtgaccggaaaactccacctcaagttttcttttgtggggctgccccccaagtgtcgtttgttttactgtaggggtctcccgcccggcgcccccagtgttttctgagggcggaaatggccaattcgggcctgcagttgctgggcttctccatggccctgctgggctgggtgggtctggtggcctgcaccg

SEQ ID NO: 24 - DNA, 351 bp, Homo sapiens
  misc_feature 179: n = A,T,C or G
gcgggcggccggctagggtggaagagccgggcgagcagagctgcgctgcgggcgtcctgggaagggagatccggagcgaatagggggcttcgcctctggcccagccctcccgctgatcccccagccagcggtccgcaacccttgccgcatccacgaaactttgcccatagcagcgggcngggcactttgcactggaacttacaacacccgagcaaggacgcgactctcccgacgcggggaggctattctgcccatttggggacacttccccgccgctgccaggacccgcttctctgaaaggctctccttgcagctgcttagacgctggatttttttcgggtagtggaaaac

SEQ ID NO: 25 - DNA, 481 bp, Homo sapiens
cgaagaaggcaggggcccttagagtcttggttgccaaacagatttgcagatcaaggagaacccaggagtttcaaagaagcgctagtaaggtctctgagatccttgcactagctacatcctcagggtaggaggaagatggcttccagaagcatgcggctgctcctattgctgagctgcctggccaaaacaggagtcctgggtgatatcatcatgagacccagctgtgctcctggatggttttaccacaagtccaattgctatggttacttcaggaagctgaggaactggtctgatgccgagctcgagtgtcagtcttacggaaacggagcccacctggcatctatcctgagtttaaaggaagccagcaccatagcagagtacataagtggctatcagagaagccagccgatatggattggcctgcacgacccacagaagaggcagcagtggcagtggattgatggggccatgtatctgtaca

SEQ ID NO: 26 - DNA, 616 bp, Homo sapiens
cgggaactccccgccaccagcgcgggcgcgggccaaggccctgcaggagcagccaaagatgtaacagaagaatccgtaacagaagatgacaagaggagaaactatggaggagtatatgttggcctaccatctgaagctgtcaatatggtgtccagtcaaacaaagacggttcggaaaaattagaagaaaataacatcatgactcaagaatcaagagcttgctcatcagtttggaaggaatttggctccgtgggacgttgtaatgtgcacagacatttccaaggaaattctaaacagtcacccttcccttttgcattcccccaaatcttaagtgtatacataaaaccctgggtacatattgttgtggtaatagaagggaattggttaaacagtacacttgtttatggaactttctgtggccacctacgaaagacaagttaacaaactgtcatggaggctgttgttgcccagccagggccgctgcattttgacaacatttccaccctggccactcagcacatttcatggaggtcatgtcttttcactgatacttttttgatagtttttatataacaaaatccttattctatttataacttaagatgataaggcactat

SEQ ID NO: 27 - DNA, 478 bp, Homo sapiens
gcaccatgagcgtcccggccttcatcgacatcagtgaagaagatcaggctgctgagcttcgtgcttatctgaaatctaaaggagctgagatttcagaagagaactcggaaggtggacttcatgttgatttagctcaaattattgaagcctgtgatgtgtgtctgaaggaggatgataaagatgttgaaagtgtgatgaacagtgtggtatccctactcttgatcctggaaccagacaagcaagaagctttgattgaaagcctatgtgaaaagctggtcaaatttcgcgaaggtgaacgcccgtctctgagactgcagttgttaagcaaccttttccacgggatggataagaatactcctgtaagatacacagtgtattgcagccttattaaagtggcagcatcttgtggggccatccagtacatcccaactgagctggatcaagttagaaaatggatttctgactggaatctcaccac

SEQ ID NO: 28 - DNA, 461 bp, Homo sapiens
aacagcataccagcagtataaaatgtacaagaaatattagggaggcaagctggaattgacaatgagaagatttgaaaagggacctttgataagttgtcttgtctggtggttggtttgtttgttaaatctgtgttggtctgtgggtctcagaatctgcaagttctactttcagctgctcttaaataaactaacagacttactcttcaaataattagatagttacaaaaaaccccagcaaatccccatcacattaatggggggaaaacacttcttatttataaattcatgctatataaaatttcctataatagagtatgcaatgtctggcccatactagtactccaataatagcctttgttattgaagaaaaattacagagaatcacttgtttgcagactgcattcagaattgtcattaggtttctgtagtctaggcagaatcatcgtaaatgaatgaaataa

SEQ ID NO: 29 - DNA, 351 bp, Homo sapiens
ctcccctctgtatatagcatctcccccctcctagtgagcaggggcctgcaaggcatcactcccagcccctcgccttctagggcaccctcagcaaaggggcaggtggggacactccaagtggggcagctctccgtacatgcgccccacccccatgagccagttcagccctactgggggctgagcgggggcatcccctcctttgtacatagtctccatggatgtccctgccctgtagccaccagccccttgctgctctccctttaatgccatatggcccctgcctagggcacaggccccaacctgtgtgctggggtccccagcagcaaacactggaaagtctgtttttttttt

SEQ ID NO: 30 - DNA, 451 bp, Homo sapiens
aatcttggtttttcagttgatcttaagcatgtcaattcataaaaacaagtcatttttgtatttttcatctttaagaatgcttaaaaaagctaatccctaaaatagttagatctttgtaaatgcatattaaataataaagtatgacccacattactttttatgggtgaaaataagacaaaaataatagttttagtgaggatggtgctgagtaaacataaaaactgatttgctctcagctgatgtgtcctgtacacagtgggaagattttagttcacacttagtctaactcccccattttacagatttctcactatatatatttctagaaggggctatgcatattcaatgtattgagaaccaaagcaaccatgaaggcaataccactgctggattggatatgagggaaggcaccattggagatatggctatcctgggtataacagaaagtttt

SEQ ID NO: 31 - DNA, 469 bp, Homo sapiens
cggtgctcggagtgtggtacttctcctagttgcagtcaggcttcatacgctattgtcctgcccgttagagcagccagcgggtacagaatggattttggaagagggagtcaccactggacctccaaggaagccacgtgcagacatctacaaccttcgatctcctgacgagtttattgttggccaaaaccaggctttgattgaaccaggatgaatgcgggtgttggaagtagaatatatatatacatataaaattgaaactggcgatggaatatgagaggagccctctggaaagaaaaggacagaccctgtgctttcatgaaagtgaagatctggctgaaccagttccacaaggttactgtatacatagcctgagtttaaaaggctgtgcccacttcaagaatgtcattgttagactttgaaatttctaactgcctacctgcataaagaaaataaaatcttttaaatcaaa

SEQ ID NO: 32 - DNA, 451 bp, Homo sapiens
tgaaggcgtcttcaagttcctgcgctccgaggctgtggcccaactatggggccaaaagaaaaagaacagcaacatgacctacgagaagctgagccgggccatgaggtactactacaaacgggagatcctggaacgggtggatggccggcgactcgtctacaagtttggcaaaaactcaagcggctggaaggaggaagaggttctccagagtcggaactgagggttggaactatacccgggaccaaactcacggaccactcgaggcctgcaaaccttcctgggaggacaggcaggccagatggcccctccactggggaatgctcccagctgtgctgtggagagaagctgatgttttggtgtattgtcagccatcgtcctgggactcggagactatggcctcgcctccccaccctcctcttggaattacaagccctggggtttgaagctgact

SEQ ID NO: 33 - DNA, 518 bp, Homo sapiens
aaggagtaggtggtgggatctcaccgtgggtccgattagccttttctctgccttgcttgcttgagcttcagcggaattcgaaatggctggcggtaaggctggaaaggactccggaaaggccaagacaaaggcggtttcccgctcgcagagagccggcttgcagttcccagtgggccgtattcatcgacacctaaaatctaggacgaccagtcatggacgtgtgggcgcgactgccgctgtgtacagcgcagccatcctggagtacctcaccgcagaggtacttgaactggcaggaaatgcatcaaaagacttaaaggtaaagcgtattacccctcgtcacttgcaacttgctattcgtggagatgaagaattggattctctcatcaaggctacaattgctggtggtggtgtcattccacacatccacaaatctctgattgggaagaaaggacaacagaagactgtctaaaggatgcctggattccttgttatctcaggactctaaatactctaacagc

SEQ ID NO: 34 - DNA, 429 bp, Homo sapiens
  misc_feature 4, 35, 358, 408: n = A,T,C or G
gtanctcggaagggtcaaaagagtccgcggttttnccgcgtgagttgctttttgcggctggggaggtctacgcttctagagcttgagccagcggggcgaccctgcagtggcaggactcggcaccgcgccctccaccgccggttggtggcctgcgtgacagtttcctcccgtcgacatcgaaaggaagccggacgtgggcgggcagagagcttcatcgcagtaggaatggcagccccatctatgaaggaaagacaggtctgctggggggcccgggatgagtactggaagtgtttagatgagaacttagaggatgcttctcaatgcaagaagttaagaagctctttcgaatcaagttgtncccaacagtggataaaatattttgataaaagaagagactacttaaaattnaaagaaaaatttgaagcatga

SEQ ID NO: 35 - DNA, 362 bp, Homo sapiens
  misc_feature 35, 305, 309, 342, 353: n = A,T,C or G
cttcgcctccgcgcctcgcgctatgggacatgatnccccgatccgccagcaccacctgaggattcagaaaccgccccagcgatggaagaggatcaggagctggagagaaaaatatctggattgaagacctcaatggctgaaggcgagaggaagacagccctggaaatggtccaggcagctggaacagatagacactgtgtgacatttgtattgcacgaggaagaccataccctaggaaattctctacgttacatgatcatgaagaacccggaagtgggaattttgtggttacactacgacccatncttnagagagcaaaattaatttacgcattcagactcnaggtacccttncagctgttg

SEQ ID NO: 36 - DNA, 455 bp, Homo sapiens
tttgtgtgtggatatgtgaagcttttccaaatagagctctcagaagaattaagtttttacttctaattattttgcattactttgagttaaatttgaatagagtattaaatataaagttgtagattcttatgtgtttttgtattagcccagacatctgtaatgtttttgcactggtgacagacaaaatctgttttaaaatcatatccagcacaaaaactatttctggctgaatagcacagaaaagtattttaacctacctgtagagatcctcgtcatggaaaggtgccaaactgttttgaatggaaggacaagtaagagtgaggcccagttcccaccacacgagggcttttgtattgttctactttttcagccctttactttctggctgaagcatccccttggagtgccatgtataagttgggctattagagttcatggaacatagaacaaccatg

SEQ ID NO: 37 - DNA, 365 bp, Homo sapiens
  misc_feature 275: n = A,T,C or G
ccgcgctggagtatccagataggcgacacgccggcgggcggctgaggcgggaatggctgctgtactgcagcgcgtcgagcggctgtccaatcgagtcgtgcgtgtgttgggctgtaacccgggtcccatgaccctccaaggcaccaacacctacctagtggggaccggccccaggagaatcctcattgacactggagaaccagcaattccagaatacatcagctgtttaaagcaggctctaactgaatttaacacagcaatccaggaaattgtangtgactcactggcaccgagatcattctggaggcataggagatatttgtaaaagcatcaataatgacactacctattgcattaaaaaactt

SEQ ID NO: 38 - DNA, 300 bp, Homo sapiens
  misc_feature 8, 12, 205: n = A,T,C or G
agccggcntgtncccaacaatgaagatgtcgacatgacagagctcggggacctcttcatgcacctttctggagtggaatcatcagaaccctaaagagtagatggttgccctgcatcttgggctccatcggccgaaactttcccaagccagggtgtgcggagcttccctgtactgcagccaaggtgacgtgtgacttggatttgantggagttgggcttagccttagtctcattcaatctccattattacagccatggggaagagtgaaagatataaagtaacctaattaaatgtatggaa

SEQ ID NO: 39 - DNA, 409 bp, Homo sapiens
gtgccggtggagtcgtgttggtcctcagaatccccgcgtagccgctgcctcctcctaccctcgccatgtttcttacccggtctgagtacgacaggggcgtgaatactttttctcccgaaggaagattatttcaagtggaatatgccattgaggctatcaagcttggttctacagccattgggatccagacatcagagggtgtgtgcctagctgtggagaagagaattacttccccactgatggagcccagcagcattgagaaaattgtagagattgatgctcacataggttgtgccatgagtgggctaattgctgatgctaagactttaattgataaagccagagtggagacacagaaccactggttcacctacaatgagacaatgacagtggagagtgtgacccaagc

SEQ ID NO: 40 - DNA, 638 bp, Homo sapiens
  misc_feature 569, 617, 619: n = A,T,C or G
ctgatgtccaggcattcttttacacatccgtcccttcctagtctctgtgcccagtgcaactcgtcccaaatcttccttctttccctcccacctgtcccctcagtcccaaccccaggcgttgctgagtgtgtctaatcttccttttctacaaacccatctgacctctcccctcctctccacgccaagctaggtcccaattcttcctcaggctccactcctccaccctgtaatctttttatcacctcccctcctcacacctggtccggcttacagtttcgttccgtgactagccctcccccacctgcccagcaatttactcttaaaaaggtggctggagctaaagacatagtcaaggttaatgctcctttttctttatcccaaatcagaagcgtttaggctctttttcatcaaatataaaaacccagcccagttcatggctcgttcggcagcaaccctgagacgctttacagccctagaccctaaaaggtcaaaaggccgtcttattctcaatatacattttattacccaatctgctcccgatattaaataaaactccaaaaattaaattncggccctcaaactccacaacaggatttaattaacctcgccttcaaggngnacaataaaaaaaaaaaaaa

SEQ ID NO: 41 - DNA, 484 bp, Homo sapiens
tgcaggcgaaagcaagaagatgacagggacggtttgctggctgaacgagagcaggaagaagccattgctcagttcccatatgtggaattcaccgggagagatagcatcacctgtctcacgtgccaggggacaggctacattccaacagagcaagtaaatgagttggtggctttgatcccacacagtgatcagagattgcgccctcagcgaactaagcaatatgtcctcctgtccatcctgctttgtctcctggcatctggtttggtggttttcttcctgtttccgcattcagtccttgtggatgatgacggcatcaaagtggtgaaagtcacatttaataagcaagactcccttgtaattctcaccatcatggccaccctgaaaatcaggaactccaacttctacacggtggcagtgaccagcctgtccagccagattcagtacatgaacacagtggtcaggacatatgtgactactaacgtct

SEQ ID NO: 42 - DNA, 399 bp, Homo sapiens
cctcgtgtgaagggtgcagtacctaagccggagcggggtagaggcgggccggcacccccttctgacctccagtgccgccggcctcaagatcagacatggcccagaacttgaaggacttggcgggacggctgcccgccgggccccggggcatgggcacggccctgaagctgttgctgggggccggcgccgtggcctacggtgtgcgcgaatctgtgttcaccgtggaaggcgggcacagagccatcttcttcaatcggatcggtggagtgcagcaggacactatcctggccgagggccttcacttcaagatcccttggttccagtaccccattatctatgacattcgggccagacctcgaaaaatctcctcccctacaggctccaaagacctacagatgg

SEQ ID NO: 43 - DNA, 102 bp, Homo sapiens
  misc_feature 14, 18, 21, 25, 26, 44, 67, 87: n = A,T,C or G
ctgctgggctggancggnggngccnncatgtccgacagcgagangctcaacctggactcgatcatcnggcgcctgctggaagtgcanggctcgcggcctggc

SEQ ID NO: 44 - DNA, 401 bp, Homo sapiens
gttattgcttggacaccattgcagaaaatcaagccaaaaatgagcacctgcagaaagaaaatgaaaggcttctgagagattggaatgatgttcaaggacgatttgaaaaatgtgtgagtgctaaggaagctttggagactgatctttataagcggtttattctggtgttgaatgagaagaaaacaaaaatcagaagtttgcataataaattattaaatgcagctcaagaacgagaaaaggacatcaaacaagaaggggaaactgcaatctgttctgaaatgactgctgaccgagatccagtctatgatgagagtactgatgaggaaagtgaaaaccaaactgatctctctgggttggcttcagctgctgtaagtaaagatgattccattatttcaagtctt

SEQ ID NO: 45 - DNA, 539 bp, Homo sapiens
ccgtcgtccgcaaagcctgagtcctgtcctttctctctccccggacagscatgagcttcaccactcgctccaccttctccaccaactaccggtccctgggctctgtccaggcgcccagctacggcgcccggccggtcagcagcgcggccagcgtctatgcaggcgctgggggctctggttcccggatctccgtgtcccgctccaccagcttcaggggcggcatggggtccgggggcctggccaccgggatagccgggggtctggcaggaatgggaggcatccagaacgagaaggagaccatgcaaagcctgaacgaccgcctggcctcttacctggacagagtgaggagcctggagaccgagaaccggaggctggagagcaaaatccgggagcacttggagaagaagggaccccaggtcagagactggagccattacttcaagatcatcgaggacctgagggctcagatcttgcaaatactgtggacaatgcccgcatcgttctgcagattgacaatgcccgtcttgctgctgatgact

SEQ ID NO: 46 - DNA, 228 bp, Homo sapiens
tggatttgaggttacctcaagaagtgagatgtcttcagggagwgakatttcccctgtgagtgaaatgccttctaggagttaaccgtcctcgggagccgactatgactactcagaagagtatgataacgaaccacaaatacctggctatattgtcgatgattcagtcagagttgaacaggtagwtaagcccccccaaaacaagacggaaagtgaaaatacttcagataa

SEQ ID NO: 47 - DNA, 316 bp, Homo sapiens
gaagaagatcgagacacgtgatgggaagctggtgtctgagtcctctgacgtcctgcccaagtgaacagctgcggcagcccctcccagcctacccctcctgcgctgccccagagcctgggaaggaggccgctatgcagggtagcactgggaacaggagacccacctgaggctcagccctagccctcagcccacctggggagtttactacctggggaccccccttgcccatgcctccagctacaaaacaattcaattgctttttttttttggtccaaaataaaacctcagytagctctgccaaaaaaaaaaaaaaaaa

SEQ ID NO: 48 - DNA, 319 bp, Homo sapiens
cttggaggttggcggcgcggggctgaaggctagcaaaccgagcgattatgtcgcacaaacaaatttactattcggacaattacgacgacgaggagtttgagtatcgacatgtcatgctgcccaaggacatagccaagctggtccctaaaacccatctgatgtctgaatctgaatggaggaatcttggcgttcagcagagtcagggatgggtccattatatgatccatgaaccaraacctcacatcttgctgttccggcgcccactacccaagaaaccaaagaaatgaagctggcaagctacttttcagcctcaagcttt

SEQ ID NO: 49 - DNA, 401 bp, Homo sapiens
gtatttataaagtttttccagataaactaatcaaataaattagaataatgtgacaacattacaaatttaatttgttagctgcattccttctgatgttaccacgatagaatgttactgatgattcagggctatttctgaagtctgtatgtkgctgctgtccccagtgatggtggacttatctttgccttacctgatcacaaattatgttggggaaaataaagatttaatatttctttaaatagaaaaagaatttggttttgctcgtttaagagcaatgagaaaatgatggaatgttgactgtgtttggcacacaggacacggaccttcatggaagtccttgctctgcgtggcatctgtcagcttttcacctttcattcttattcttcacttttgctgctgag

SEQ ID NO: 50 - DNA, 505 bp, Homo sapiens
ctgaatgcatttatttcacaaatttgtttaagggctataaacaaaatttgtatcaacttgtttgtatatatttacaaaacagaaaattaagtcagcattaagtcaacatgagtagtcacagaatttttcccctttataaatggtacatattcaaggagacttcaaaaagtttgtggaaaaatggttaaaagataaaaaatataaactatatttttgaacattagctctatagcattcaagacacttttgtaagtgatgataccagctatttagtccatccctaaagaactgagagttctgggaatttatctacatcaatgcagtttctttatacattaacttgagaaaaatgtactgccctgaaaaatttttttaagattaggaaacaaaaagtcagaaggtgccaaaccaggactgtagggtggatgcctagtgatttcccatcaaaactcttgcaaaatggccttgtttgatgagagggatgagcaggaacattgttgtggtg

SEQ ID NO: 51 - DNA, 363 bp, Homo sapiens
gcactacggggacgctgggccgggcaccgggctgtgtggagaagtgagcgcgctcgtctgacccccgtgcccgccaccccgagccactaacggcgatctcccaaggcctgccggaggcctctgtcctctgtcctcagccccgcagcggcaacgtcttgcactcggcgagctcgccgctcccgaccctcccgcgcccccgccctgccgcgctgctccccgcccagccgcgggtctgtggtccaagccgccccgaagcagcccgaacaagatcactcaaggtgaaggataatctactaataccagcactttgaatgaaaatttgtttctctgccacaaactgaacatcttttttttttttttttt

SEQ ID NO: 52 - DNA, 492 bp, Homo sapiens
cccaggacaagttgcctgtgtgtttatttagttttcttttgatctcccaccattttctcttagtttcaaaaagaggcggtgatgcagagtcgtttaggcaatcaaccctcccacgtcccctggctcagctaatgctggtggtcattcgttgccatttctgcgaaaggggacggacggaaccgcccgcagtacccgcttgccaccggctggacgagggggagggacgacagcttttactgtcccaaatcctgagattaagacctcagggctaaatcttgcgtggcggtaaaaattatttggaagttctgtgcaaccgttccaatattccgcttttacgtgcacggaaatagcctaagtccagatgccagccagggaagccactccgggccccgctgactaagccctggactgatggtctggagtctttaggccgggtcaactatgactcttgacgttgactcattctccttaggcgagtgacttaatcgctcg

SEQ ID NO: 53 - DNA, 454 bp, Homo sapiens
gggactcgcgtcggttggcgactcccggacgtaggtagtttgttgggccgggttctgaggccttgcttctctttacttttccactctaggccacgatgccgcagtaccagacctgggaggagttcagccgcgctgccgagaagctttacctcgctgaccctatgaaggcacgtgtggttctcaaatataggcattctgatgggaacttgtgtgttaaagtaacagatgatttagtttgtttggtgtataaaacagaccaagctcaagatgtaaagaagattgagaaattccacagtcaactaatgcgacttatggtagccaaggaagcccgcaatgttaccatggaaactgagtgaatggtttgaaatgaagactttgtcgtgtacttaggaagtaaatatcttttgaattagagaaagtgttgggacagaaagtactttatgtaactaagtgg

SEQ ID NO: 54 - DNA, 454 bp, Homo sapiens
ctggacacggcatgatgttcgtccgcaacgattgcaaggtgttcagattttgcaaatctaaatgtcataaaaactttaaaaagaagcgcaatcctcgcaaagttaggtggaccaaagcattccggaaagcagctggtaaagagcttacagtggataattcatttgaatttgaaaaacgtagaaatgaacctatcaaataccagcgagagctatggaataaaactattgatgcgatgaagagagttgaagaaatcaaacagaagcgccaagctaaatttataatgaacagattgaagaaaaataaagagctacagaaagttcaggatatcaaagaagtcaagcaaaacatccatcttatccgagcccctcttgcaggcaaagggaaacagttggaagagaaaatggtacagcagttacaagaggatgtggacatggaagatgctccttaaaaatc

SEQ ID NO: 55 - DNA, 543 bp, Homo sapiens
cgagtgcactgaagatggcggctgctgtaggacggttgctccgagcgtcggttgcccgacatgtgagtgccattccttggggcatttctgccactgcagccctcaggcctgctgcatgtggaagaacgagcttgacaaatttattgtgttctggttccagtcaagcaaaattattcagcaccagttcctcatgccatgcacctgctgtcacccagcatgcaccctattttaagggtacagccgttgtcaatggagagttcaaagacctaagccttgatgactttaaggggaaatatttggtgcttttcttctatcctttggatttcacctttgtgtgtcctacagaaattgttgcttttagtgacaaagctaacgaatttcacgatgtgaactgtgaagttgtcgcagtctcagtggattcccactttagccatcttgcctggataaatacaccaagaaagaatggtggtttgggccacatgaacatcgcactcttgtcagacttaactaagcagatttcccgagactacggtgtgctgttag

SEQ ID NO: 56 - DNA, 502 bp, Homo sapiens
gtttataatgctacaaaatgaacaggagataagtcaactgaaaaaagaaattgaaagaacacaacaaaggatgaaagaaatggagagtgttatgaaagagcaagaacagtacattgccactcagtacaaggaggccatagatttggggcaagaattgaggctgacccgggagcaggtgcagaactctcatacagaattggcagaggctcgtcatcagcaagtccaagcacagagagaaatagaaaggctctctagtgaactggaggatatgaagcaactctctaaagagaaagatgctcatggaaaccatttagctgaagaactgggggcttctaaagtacgtgaagctcatttagaagcaagaatgcaagcagaaatcaagaaattgtcagcagaagtagaatctctcaaagaagcttatcatatggagatgatttcacatcaagagaaccatgcaaagtggaagatttctgctgactctcaaaagtcttctgttcagcaa

SEQ ID NO: 57 - DNA, 503 bp, Homo sapiens
cgctgtggttgctgtccgcggagtggaagcgcgtgcttttgtttgtgtccctggccatggcgctgcagctctcccgggagcagggaatcaccctgcgcgggagcgccgaaatcgtggccgagttcttctcattcggcatcaacagcattttatatcagcgtggcatatatccatctgaaacctttactcgagtgcagaaatacggactcaccttgcttgtaactactgatcttgagctcataaaatacctaaataatgtggtggaacaactgaaagattggttatacaagtgttcagttcagaaactggttgtagttatctcaaatattgaaagtggtgaggtcctggaaagatggcagtttgatattgagtgtgacaagactgcaaaagatgacagtgcacccagagaaaagtctcagaaagctatccaggatgaaatccgttcagtgatcagacagatcacagctacggtgacatttctgccactgttggaagtttcttgt

SEQ ID NO: 58 - DNA, 563 bp, Homo sapiens
gggaaatgctggcgcgcgcggcgcggggcactggggcccttttgctgaggggctctctactggcttctggccgcgctccgcgccgcgcctcctctggattgccccgaaacaccgtggtactgttcgtgccgcagcaggaggcctgggtggtggagcgaatgggccgattccaccggatcctggagcctggtttgaacatcctcatccctgtgttagaccggatccgatatgtgcagagtctcaaggaaattgtcatcaacgtgcctgagcagtcggctgtgactctcgacaatgtaactctgcaaatcgatggagtcctttacctgcgcatcatggacccttacaaggcaagctacggtgtggaggaccctgagtatgccgtcacccagctagctcaaacaaccatgagatcagagctcggcaaactctctctggacaaagtcttccgggaacgggagtccctgaatgccagcattgtggatgccatcaaccaagctgctgactgctggggtatccgctgcctccgttatgagatcaaggatatccatgtgccaccccgggtg

SEQ ID NO: 59 - DNA, 563 bp, Homo sapiens
gcttctccgctccttctaggatctccgcctggttcggcccgcctgcctccactcctgcctccaccatgtccatcagggtgacccagaagtcctacaaggtgtccacctctggcccccgggccttcagcagccgctcctacacgagtgggcccggttcccgcatcagctcctcgagcttctcccgagtgggcagcagcaactttcgcggtggcctgggcggcggctatggtggggccagcggcatgggaggcatcaccgcagttacggtcaaccagagcctgctgagcccccttgtcctggaggtggaccccaacatccaggccgtgcgcacccaggagaaggagcagatcaagaccctcaacaacaagtttgcctccttcatagacaaggtacggttcctggagcagcagaacaagatgctggagaccaagtggagcctcctgcagcagcagaagacggctcgaagcaacatggacaacatgttcgagagctacatcaacaaccttaggcggcagctggagactctgggccaggagaagctgaagctggaggcggagcttggc

SEQ ID NO: 60 - DNA, 474 bp, Homo sapiens
ggcggcctgcattgcagcggggcactgggctgcaatgggcctaggccggagtttccaagccgccaggactctgctccccccgccggcctctatcgcctgcagggtccacgcggggcctgtccggcagcagagcactgggccttccgagcccggtgcgttccaaccgccgccgaaaccggtcatcgtggacaagcaccgccccgtggaaccggaacgcaggttcttgagtcctgaattcattcctcgaaggggaagaacagatcctctgaaatttcaaatagaaagaaaagatatgttagaaaggagaaaagtactccacattccagagttctatgttggaagtattcttcgtgttactacagctgacccatatgccagtggaaaaatcagccagtttctggggatttgcattcagagatcaggaagaggacttggagctactttcatccttaggaatgttatcgaaggacaagg

SEQ ID NO: 61 - DNA, 453 bp, Homo sapiens
ccagaagggcacactttcatctaatttggggtatcactgagctgaagacaaagagaagggggagaaaacctagcagaccaccatgtgctatgggaagtgtgcacgatgcatcggacattctctggtggggctcgccctcctgtgcatcgcggctaatattttgctttactttcccaatggggaaacaaagtatgcctccgaaaaccacctcagccgcttcgtgtggttcttttctggcatcgtaggaggtggcctgctgatgctcctgccagcatttgtcttcattgggctggaacaggatgactgctgtggctgctgtggccatgaaaactgtggcaaacgatgtgcgatgctttcttctgtattggctgctctcattggaattgcaggatctggctactgtgtcattgtggcagcccttggcttagcagaaggaccactatgtcttgattc

SEQ ID NO: 62 - DNA, 504 bp, Homo sapiens
gggataaatacagtgcatgtctgcttcaattagcagatgccgcaactccacacagtgtgtaaaatatatacaaccaaaaatcagcttttgcaggtctttatttcttctgtaaaacagtaggtaacttttcctaggtttcactctttttagtgtactagatccagaaacttagtgtaatgccctgctttatatttctttgacttaacattggtttcagaaagaatcttagctacctagaatttacagtctctgtttcatggcaacactggataatggctttgtgaaatttaaaaaatttttgtagcgactgtaaacagaaatgccaaattgatggttaattgttgctgcttcaaaaataagtataaaattaatatgtaaggaagcccattctttcatgttaaatacttggggtgggaggggagaaagggaaccttttcttaaaatgaaaataattactgctattttaaaatttcttgatcattgaatgtgagacccttctaacat

SEQ ID NO: 63 - DNA, 463 bp, Homo sapiens
aaatggcgcgggtgctgaaggctgcagccgcgaatgccgtagggcttttttccagacttcaagctcccattccaacagtaagagcttcttccacatcacagcccttggatcaagtgacaggttctgtgtggaacctgggtcgactcaaccatgtagccatagcagtgccagatttggaaaaggctgcagcattttataagaatattctgggggcccaggtaagtgaagcggtccctcttcctgaacatggagtatctgttgtttttgtcaacctgggaaataccaagatggaactgcttcatccattgggacgtgacagtccaattgcaggttttctgcagaaaaacaaggctggaggaatgcatcacatctgcatcgaggtggataatattaatgcagctgtgatggatttgaaaaaaaagaagatccgcagtctaagtgaagaggtcaaaataggagcaca

SEQ ID NO: 64 - DNA, 564 bp, Homo sapiens
ccgcatcctagccgccgactcacacaaggcaggtgggtgaggaaattcagagttgccatggagaaaattccagtgtcagcattcttgctccttgtggccctctcctacactctggccagagataccacagtcaaacctggagccaaaaaggacacaaaggactctcgacccaaactgccccagaccctctccagaggttggggtgaccaactcatctggactcagacatatgaagaagctctatataaatccaagacaagcaacaaacccttgatgattattcatcacttggatgagtgcccacacagtcaagctttaaagaaagtgtttgctgaaaataaagaaatccagaaattggcagagcagtttgtcctcctcaatctggtttatgaaacaactgacaaacacctttctcctgatggccagtatgtccccaggattatgtttgttgacccatctctgacagttagagccgatatcactggaagatattcaaatcgtctctatgcttacgaacctgcagatacagctctgttgcttgacaacatgaagaaagctctcaag

SEQ ID NO: 65 - DNA, 148 bp, Homo sapiens
catgaatcttgatagacatctataacgttattattttcagtggtgtgcagcatttttgcttcatgagtatgacctaggtatagagatctgataacttgaattcagaatattaagaaaatgaagtaactgattttctaaaaaaaaaaaa

SEQ ID NO: 66 - DNA, 402 bp, Homo sapiens
tctggttttgaacgccgcgatggctgcgcagggagagccccaggtccagttcaaacttgtattggttggtgatggtggtactggaaaaacgaccttcgtgaaacgtcatttgactggtgaatttgagaagaagtatgtagccaccttgggtgttgaggttcatcccctagagttccacaccaacagaggacctattaagttcaatgtatgggacacagccggccaggagaaattcggtggactgagagatggctattatatccaagcccagtgtgccatcataatgtttgatgtaacatcgagagttacttacaagaatgtgcctaactggcatagagatctggtacgagtgtgtgaaaacatccccattgtgttgtgtggcaacaaagtggatattaagga

SEQ ID NO: 67 - DNA, 226 bp, Homo sapiens
tccgtgctgaaaatggaacagggtccagcccttggggtcctggctgcagcctccggcactttgcctgcgaacagaacctgctgtcgcggccagatggctctgcttccttcctgcaaggtgacacctctgtcctggcgggtgtgtacgggccggccgaggtgaaggtcagcaaagagattttcaacaaggccacactcgaagtgatcctgaggccgaagattgggct

SEQ ID NO: 68 - DNA, 391 bp, Homo sapiens
tggaaaggcaaagcggagcggagatcctcaaacggcctagtgcttcgcgcttccggagaaaatcagcggyctaattaattcctctggyttgktgaagcagttaccaagaatcttcaaccctttcccacaaaagctaattgagtacacgttcctgttgagtacacgttcctgttgatttacaaaaggtgcaggtatgagcaggtctgaagactaacattytgtgaagttgtaaaacagaaaacctgttagaaatgtggtggtttcagcaaggcctcagtttccttccttcagcccttgtaatktggacatctgctgctttcatattttcatacattactgcagtaacactccaccatatagacccggctttaccttatatcagcgacactgg

SEQ ID NO: 69 - DNA, 581 bp, Homo sapiens
  misc_feature 92: n = A,T,C or G
tatagctttattttttaaaaagattttataagtctgtcacaacctcaaacacttataggtgaattatttattcctctcttccatcagattangcttatcgtgtcaaatcctctgaaaaatataagtaaaaattatttttcacaaatatatatcccctatattactcaacttagttctgaaattttctccttataaatactttaacacagctgctagtggaaggactgtgttgtgcagctgcacatagctataattttataagtctgctttacttttgctagctccctggttcagctccaaggtccaaatcttataaatggttaactgggctgccagaaaagcccactgaatgcatcctgtagtgctctgtgacaagcaagagaagaagtatagcctccagcaaggtcctgtggtgaggcagctctgacatggtttaaatacccaagtcttcctagcatctcaagctcaggaacatgtggtccatatgtctctatctgcagtggctggtattcatacagagcttcttcaagcttgtgaataggtgccagtgaaatatgttgacccattttgatgcctgtgga

SEQ ID NO: 70 - DNA, 566 bp, Homo sapiens
tgcaggcgaaagcaagaagatgacagggacggtttgctggctgaacgagagcaggaagaagccattgctcagttcccatatgtggaattcaccgggagagatagcatcacctgtctcacgtgccaggggacaggctacattccaacagagcaagtaaatgagttggtggctttgatcccacacagtgatcagagattgcgccctcagcgaactaagcaatatgtcctcctgtccatcctgctttgtctcctggcatctggtttggtggttttcttcctgtttccgcattcagtccttgtggatgatgacggcatcaaagtggtgaaagtcacatttaataagcaagactcccttgtaattctcaccatcatggccaccctgaaaatcaggaactccaacttctacacggtggcagtgaccagcctgtccagccagattcagtacatgaacacagtggtcagtacatatgtgactactaacgtcttccttattccacctcggagtgagcaactggtgaattttaccgggaaggccgagatgggaggaccgttttcctatgtgtactt

SEQ ID NO: 71 - DNA, 426 bp, Homo sapiens
ccaggatctcgggctcggaacgagactgcacggattgttttaagaaaatggcagacaaaccagacatgggggaaatcgccagcttcgataaggccaagctgaagaaaacggagacgcaggagaagaacaccctgccgaccaaagagaccattgagcaggagaagcggagtgaaatttcctaagatcctggaggatttcctacccccgtcctcttcgagaccccagtcgtgatgtggaggaagagccacctgcaagatggacacgagccacaagctgcactgtgaacctgggcactccgcgccgatgccaccggcctgtgggtctctgaagggacccccccccaatcggactgccaaattctccggtttgccccgggatattatagaaaattatttgtatgaataatgaaaataaaacacacctcgt

SEQ ID NO: 72 - DNA, 279 bp, Homo sapiens
  misc_feature 126: n = A,T,C or G
ctgtccaatggcaacaggaccctcactctattcaatgtcacaagaaatgacacagcaagctacaaatgtgaaacccagaacccagtgagtgccaggcgcagtgattcagtcatcctgaatgttctnttccagccacccaaacccttcatcaccagcaacaactccaaccccgtggaggatgaggatgctgtagccttaacctgtgaacctgagattcagaacacaacctacctgtggtgggtaaataatcagagcctcccggtcagtcccaggctgcag

SEQ ID NO: 73 - DNA, 482 bp, Homo sapiens
  misc_feature 465, 481: n = A,T,C or G
ggcgtagtaagggatagcatggctaagctaagagaaaggctaaaccagaggcaaaaattgttcgaatcaggacaagggtggtttgagggactgtttaacaggtccccatggttcacgaccctgatatccaccattatgggccctctgatagtacttttattaatcctactcctcggaccctgcattctcaaccgcttggtccagtttgtaaaagacagaatttcggtggtgcaggccctggttctgacccaacagtatcaccaactcaaatcaatagatccagaagaagtagaatcgcgtgaataaaagattttattcagtttccagaaagaggggggaatgaaagaccccaccataaggcttagcaagctagctgcagtaacgccattttgcaaggcatgaaaaagtaccagagctgagttctcaaaagtcacaaagaagtttagttaaagaataagggtgaanaaaatgggaaaggggna

SEQ ID NO: 74 - DNA, 440 bp, Homo sapiens
  misc_feature 356, 411, 416: n = A,T,C or G
aaatgatagaggtttttgtgggaatcaaaatcccccaaatgttaaggtatatggtaaaaaaagaaatatctgggatcccgatgttcttaataaatcctgacttcccaagaaatgcttcttttttaagttgacaaaaggaatggggaactggcaggccgcgcagaaggttcttggttttaatggataggctgaattggattaagaaaagttgaatgccacctatggtaatctatttgtgattttcttctaaattatgtattataaattcgtagagctatagaaagcaatgagtgtgtaatttggagtgattttatatatggcataaactttgttttaacataattagtactgttttnccccaaaagtacaagtttttgagtaggaatgtaggttaagtaaagaaacttcatnacatnttatagggtagtgcggggaaatgg

SEQ ID NO: 75 - DNA, 439 bp, Homo sapiens
aaatgactacttacagcacatattaaagtcaaccaatatgaaatgcctgactccagaaaaggccctttctggttactgtggctttatggcagccaacctttatgctcgttccatatttggtgaagatgcacttgcaaatgtcagcattgagaagccaattcaccagggaccagatgctgctgttaccggccatataagaattcgtgcaaagagccagggaatggccttaagtcttggagataaaatcaacttgtcacagaagaaaactagtatataaaaataaacaaaaagtccttgaagctttacagttaatttaggtatgggcttactggactccaacatcttttgtactctttcatgcttatatagaatctgagttcatgctgaatacttttcagccaataatttatagcctttcccttaaatcaagattgagttt

SEQ ID NO: 76 - DNA, 333 bp, Homo sapiens
  misc_feature 200, 210, 221, 225, 282, 304, 323: n = A,T,C or G
aaaaactgcattactgaatttaacaaaagtcagacactagaatcatatatttgctgcataaaagttgatttgatacctggtggtgattgaatttagtctcaaagactcataaataaaaatctgacttaagacgtagtcataccagtataccaattctcccatcactttgactttcggcagagagattagagcaaaaaatnttcaggagancaggggagttncatngtattatgtatgtttaatataatatcaattttaaggttaaggttaaggaaatcttanttttaaggttaaaccttgagtnctagttatagaacttaatnttcctggtta

SEQ ID NO: 77 - DNA, 303 bp, Homo sapiens
  misc_feature 14: n = A,T,C or G
ctgtcccagcttcnatgggataatccaacaccaccagctacctgtacaaacagtaagatggtcaatccctgtctgttacccacagggacagcatgacaaggagagagcccccatctgacttaatagcaaaccaacccctttattcttatctctgctgctaggggtcaagactggtatttgttgaggtttcagattccagagacccagggatcccatccctggctgtggctacagtcacatcttaacagggccacctctgcccaggtgtacattcccaacagcatgtccttcctggttttttac

SEQ ID NO: 78 - DNA, 488 bp, Homo sapiens
  misc_feature 431: n = A,T,C or G
ccacagcatccccacgttctgagaagtacttggaaatggttgtctggaaagcttccactttggtcttgacggcattcaccctctccagcaccttctcctggattgctaccccaaaatcatttccatcttcaatcttggggatcaggtgttggatccatgtaatcaccagaatgcatttctctttgagagtccagacttctggcttaaccagggcaagcagggacaggactttctcattcccagggagaaatccacacttagggacttctttcttctcctgcttatctgtttccatctcatcatccttgggtggagggtctgggatggggatgtccagtggggcccggagggaagtcaagtcagccacattgagggagtcctcttgcaagagctgattcaggtatatgattttctgtggcaagaatctgtanaggaattcctcagcctcctggaaaagattctgcctgaagacctccacctgtttgcgg

SEQ ID NO: 79 - DNA, 422 bp, Homo sapiens
  misc_feature 112, 115, 116, 118, 199, 200: n = A,T,C or G
gtgaacccgcctggtgatctctcggatcagaactggagcaaccctcttggaacgcagcttcttgtggacacacaggaagttgatctctaccatcttcttctctgtgtcatanatnngnatgtttgctgggatggcgctaatgaacccaaccaatttccgacttgagaccactcgaaccccacagtgccactgggggagnnagccgggtggccggagagcccacaaaagaaactccggggaataatcaaatcggaacatgttgtcatcatcttccacatagttctcattcaggagggtgtacagttcttttagcacaccacgatcgcccaggtccaaagcatcccaggtgaagccctggggcagggtgtagggctcctggcggatattgtccttgtcaggctccacggggccatgggtgttca

SEQ ID NO: 80 - DNA, 434 bp, Homo sapiens
  misc_feature 341, 348, 377, 378, 397, 402, 420, 422: n = A,T,C or G
ccagtgtggattttcagcatgcctctgaagatgcaaggaagaccataaaccagtgggtcaaaggacagacagaaggaaaaattccggaactgttggcttcgggcatggttgataacatgaccaaacttgtgctagtaaatgccatctatttcaagggaaactggaaggataaattcatgaaagaagccacgacgaatgcaccattcagattgaataagaaagacagaaaaactgtgaaaatgatgtatcagaagaaaaaatttgcatatggctacatcgaggaccttaagtgccgtgtgctggaactgccttaccaaggggaggagctcagcatggtcatnctggtgncggatgacattgaggacgagtccccgggnntgaagaagattgaggaacnccccnctttggaaaagttgcctnancggactaaacct

SEQ ID NO: 81 - DNA, 206 bp, Homo sapiens
  misc_feature 91, 126, 131, 180: n = A,T,C or G
cattcaccccaaaacttgttttacaggattacaattttaattcaaaatttccagatttggggtattttgtatgatccaataacttattcgncacacggcttaatttgccatttttggggatttgtngactnattttgttgaattttacaactggtattatgtgactagctacctgatacnggtattttccttatactcaatagacc

SEQ ID NO: 82 - DNA, 205 bp, Homo sapiens
  misc_feature 28, 29, 34: n = A,T,C or G
aaaatggggttactgcagctagcttgcnnacccntatggtggggtctttcattcccccctctttctggaaactgaataaaattttttatttacgcgattttactttttctggatttattgatttgagttggtgatactgttgggttagaactagggcctgcaccaccgaaattcttgttttttacaaactggaccaagcggttga

SEQ ID NO: 83 - DNA, 526 bp, Homo sapiens
  misc_feature 29, 170, 273: n = A,T,C or G
ctgactggttcctttaccaaggtttgcanagtaggttgtgtttgaacaccttctgtgggtctgtgtcatttccaagttgaagaatttcagccaaagagcaacatgtcacattgattaaagatggttaatgacacagaaacatttctgttaatactaagggaaaaggctgntcttttatttatttatttttcctgagtcctcacgtttttcttctctgacaaatgtttgaaattcagtgaaataccaaaggagtcaaggatgaaggggacacangatggaatcagaaaaaacataaatggaatccaggcagttctatgagacaacactgatatatctccttgataaagaaaaaatgtacagaatatttaatgagtctgtcttgccccaaaagggaaaaacacaagtagctaagccatttgcagagaggaaaaatgtcatggaaaaatgaaaaatctctctaatgtctatagcacatgaaatatctaagtaggtgggtgcaggggttcatgcctgtattggggagacc

SEQ ID NO: 84 - DNA, 529 bp, Homo sapiens
  misc_feature 527: n = A,T,C or G
ccaaggtagttatccttaaaaaagccacagcatacatcctgtccgtccaagcagaggagcaaaagctcatttctgaagaggacttgttgcggaaacgacgagaacagttgaaacacaaacttgaacagctacggaactcttgtgcgtaaggaaaagtaaggaaaacgattccttctaacagaaatgtcctgagcaatcacctatgaacttgtttcaaatgcatgatcaaatgcaacctcacaaccttggctgagtcttgagactgaaagatttagccataatgtaaactgcctcaaattggactttgggcataaaagaacttttttatgcttaccatccttttttttctttaacagatttgtatttaagaattgtttttaaaaaattttaagatttacacaatgtttctctgtaaatattgccattaaatgtaaataactttaataaaacgtttatagcagttacacagaatttcaatcctagtatatagtacctagtattataggtctataaaccctaattttttnta

SEQ ID NO: 85 - DNA, 409 bp, Homo sapiens
ctgtccaatggcaacaggaccctcactctattcaatgtcacaagaaatgacgcaagagcctatgtatgtggaatccagaactcagtgagtgcaaaccgcagtgacccagtcaccctggatgtcctctatgggccggacacccccatcatttcccccccagactcgtcttacctttcgggagcgaacctcaacctctcctgccactcggcctctaacccatccccgcagtattcttggcgtatcaatgggataccgcagcaacacacacaagttctctttatcgccaaaatcacgccaaataataacgggacctatgcctgttttgtctctaacttggctactggccgcaataattccatagtcaagagcatcacagtctctgcatctggaacttctcctggtctctcag

SEQ ID NO: 86 - DNA, 444 bp, Homo sapiens
  misc_feature 399, 415, 416: n = A,T,C or G
aaaggcacttatttatcattgtaggtgtgtctaaacaattgatattcaaaaacacaactttttgtgtacaaaattttacaatttttaacaaaagcagtgaagacactaaataacccagtggcgacctcttcaaagtgcagtgtccttggtcaccaatgcagatgctactggggcagccagcgggctcagagggtccaactccagacactgcatccatggctgtcctagactgagttgcacttgtaaaagagatggtcccacacctactaaaaaaacaagctactctagtatcaatatgacatcactcttttaccatcaatcatattgcaaaaccatagtatttaacgacaatgtgacattaggtatttcttttgagcacacaaaaacaaatgtatagtnacttgatgaggaaatnnttcactttgactcaaatggattgaccat

SEQ ID NO: 87 - DNA, 505 bp, Homo sapiens
  misc_feature 504: n = A,T,C or G
aaaaatgtatgtgtatgtgtatgtatgtatatttataaagtatgtacgcataaaggaatctgttcacaggaaaatgttacattattttcaactctaaattatgcagaagactatacaaagtagttaattaatactatactatctactttcttttcaaaagacatttcacacaaatccaaaaagtaagccggcttaaagaataagacaatcataacacctcttgcccaggctaattgtaatgcttaggaaaggaagtccacttttatttttctgaacggatgatttgtaagtaaggaagaaaattgtttacaattgatcagtcaccaaaataatttttttttctgggaaaggaaaaaaaatcccaagaaaaagatcagtacatgactctttaataaatttatcttcccccacggaagactactcctaagtaaccttttggactttgatatcttattaaatttgggagtgagggggataattacttggtattatttataacttggna

SEQ ID NO: 88 - DNA, 527 bp, Homo sapiens
accgagctcggatccctagtaacggccgccagtgtgctggaattcgcccttggccgcccgggcaggtctggacagtagattacaaagcatctccgatcacgttaaggcagatgatcaatctgtggctgcatctgtaactcctcctgggaaaataatcctgttggagttgggggctcttcccagttgtctggttagttggcccaggaaggggcagtcctggagctggcgggtggggagccaggccccacctgtcttgtcactgctcgttctgctggccctctgtcactgatgctgatacggagccctggcccttgttgacatcactgatgcacacccactgcccatcaactgactccttccacagggtcaccttattgtctccaccagagacagccaggatgttggctgtgatggaccagctcacatgccacaccacatcgttgaacttgtgcaacaatttaggggaccacgtattgcttgaggcatcatcacaggtccaaatgaacacacgaccatcctgggagcag

SEQ ID NO: 89 - DNA, 499 bp, Homo sapiens
  misc_feature 15: n = A,T,C or G
cctgggcttgaaatntgctgagctggtgtataccggtttctggcacagccctgagtgtgaatttgtccgccactgcatcgccaagtcccaggagcgagtggaagggaaagtgcaggtgtccgtcctcaagggccaggtgtacatcctcggccgggagtccccactgtctctctacaatgaggagctggtgagcatgaacgtgcagggtgattatgagccaactgatgccaccgggttcatcaacatcaattccctcaggctgaaggaatatcatcgtctccagagcaaggtcactgccaaatagacccgtgtacaatgaggagctggggcctcctcaatttgcagatcccccaagtacaggcgctaattgttgtgataatttgtaattgtgacttgttctccccggctggcagcgtagtggggctgccagccccagctttgttccctggtccccctgaagcctgcaaacgttgtcatcgaagggaagggtggggggcag

SEQ ID NO: 90 - DNA, 484 bp, Homo sapiens
aaagatattttcttgaattatttagaacatggtaagcctggtattttttaatcaaacaaaatatttatgaaatgggttttctcttaattctggattcatcatggctttctaataccaattgtaatatttacaatattcaccaaaacttagaattttgcaaatgctggaattctgccagtgtttctttgctaagccttgcatgcaaaatttgaaattttaacattggcacccaaaacctacatggaatgtatgtctggagtatttcaaactttacattgaaacataatttccttggaaaacaaaccataagcctgaggaggtttttatcaactggaatgctttatattagtttgtttttcactgtacattcctcattttacattcatttaacctgccgattatttaatttttttattgtaaagtaagtttttagcatttgcttttatttttttactttgatgccttttcaaattggcatgtcttt

SEQ ID NO: 91 - DNA, 318 bp, Homo sapiens
  misc_feature 315: n = A,T,C or G
aaacttggtaagagcccattagctgccaagagggaataaggaataaatttcaaaaaatgtacaatttcctttagagaagtttcagaaccaagactaatttacatgaaaagctgtagagaaagtagttgaaaagtccattcataaaacttttattccacttacatgaatttaatacacgtgttcttaacaattatgcttggattgttcatgaaaatttcataagacattaaacaaagctagccatcatctcaagttatttccctgttaactatttttacagcacatgcatgttaggcaagtatcaaaaaaaaaaantcc

SEQ ID NO: 92 - DNA, 257 bp, Homo sapiens
aaaatgttttatttcatagctcataaaaaagtatgtatgtacaagactcaagtaaatagaaaggcagctttcaatcacaaatcagtttttcagattttactgtggaagcatatttaatgcacacatttgaatgttacacataaataattttaacgatggagtccaagttctggattttacattagatctgcatatataagacacttgtgggcaaatttcaagattggtaaagccagtttcaagctgcttatattttg

SEQ ID NO: 93 - DNA, 389 bp, Homo sapiens
  misc_feature 299, 311, 314: n = A,T,C or G
ttggacgagttggtggtaggatgcagtccagagcctcaagcagcgtggttccactggcattgccatccttacgggtgactttccatcccttgaaccaaggcatgttagcacttggctccagcatgttgtcaccattccaaccagaaattggcacaaatgctactgtgtcggggttgtagccaattttcttaatgtaagtgctgacttccttaacaatttcctcatatctcttctggctgtagggtggctcagtggaatccattttgttaacaccgacaattaagttgtttcacacccantgtgtaagccanaanggcatgctctcgggtctgcccattcttggagataccagcttcaaattcaccaacaccagcagcaacaatcaggac

SEQ ID NO: 94 - DNA, 407 bp, Homo sapiens
aaaatctctggcttcaaagtttcttggggaaaggtcggtttacctcacattttttgtttccattagtaatattctaggtacctcacaaaatgtattatggtgccatggctgttagtttttagtgagtgctgtaggattaattcgaaaataggcagaattccattcctcccaaggtggcaaaaattagctatactgatgtaattgtcatttacctgggtatgaattccctgacacacattcatgtcaacatatgtagcaaattttgtgaaaacataacaatttgaagcttctgtaattttgagcactgctctaacaacaagcataatataaaattagttagattttgcaagtctacaaatgaactcttgcaacagaactcacagcctttttactttttttccctaact

SEQ ID NO: 95 - DNA, 420 bp, Homo sapiens
aaatgtcttgtttcccagatttcaggaaactttttttcttttaagctatccacagcttacagcaatttgataaaatatacttttgtgaacaaaaattgagacatttacattttctccctatgtggtcgctccagacttgggaaactattcatgaatatttatattgtatggtaatatagttattgcacaagttcaataaaaatctgctctttgtataacagaatacatttgaaaacattggttatattaccaagactttgactagaatgtcgtatttgaggatataaacccataggtaataaacccacaggtactacaaacaaagtctgaagtcagccttggtttggcttcctagtgtcaattaaacttctaaaagtttaatttgagattccttataaaaacttccagcaaagcaacttt

SEQ ID NO: 96 - DNA, 445 bp, Homo sapiens
gttctagtactcttctttgtcagtatatcaacctacagctcctgaatgcagagccacaagagtgtttaatggggacagtgggcactctcctgcttgaaaacccacttgggcagaatggactcacccaccaaggtcttctgtatgaagcagccaaggtgtttggccttcggagcaggaagctaaagctgtttctgaatgagacccaaacgcaggaaattacagaagacatccccgtgaagactttgaatatgaagactgtgtatgtttctgtgttaccaacaacagcagacttctagcatgtacttatcaatgttgttcggtcagcccttccctaattacacctatcccctacacatacatgcacatagacacacacatgaacacactgaagatatttccttcaggtgtgtgtaaaatacgctgcttggattgaaattcaaatggg

SEQ ID NO: 97 - DNA, 21 bp, Homo sapiens
  misc_feature 15, 21: n = A,T,C or G
acccagcagacctcngccgcn

SEQ ID NO: 98 - DNA, 284 bp, Homo sapiens
cctatctgacccctacttcccatcatggtctgaaccagtttttcaggttaactttggaatgaccctggctgagaggaggggtgcattcaaatagttgaggggcttggaattttatttgtggtttacactatagaaagtatttttccagtattacctggacaatgtgtctccctgtcagtatccagggaatggcacctggatcaagcatttagtgttcagttgctacactctcacctaatccctcattttcaatattttgccatgttttccagtgacccaactgg

SEQ ID NO: 99 - DNA, 265 bp, Homo sapiens
ccattttcttttttcaccttaaaggtcaaacatgaaacaatgaggaatgtaggtctttgtaaaacacataaatacctgtgatgttttgaatcatttggcccttaaaaatattgcttaacaagttaaacccagcttaattgtaggtaaatgcaagtatacccaaggctggactattttagtctgcttttggctgcagattgtacttctgtggctggaaaaaatgttcttcaatagcactgaccagttcattcagttccttcttcag

SEQ ID NO: 100 - DNA, 279 bp, Homo sapiens
aaaaaatgtgaaagccaaagaattaagttctagttctgactcatcacaagaggtcaaaagtatttgctactgtaacattcaattcacatttgagaatcatggtaaaaataacttgtatttgccttaccatcatgatcctactgttgagttaggaaaatatggttagacagactcacattactttttttcagaggtaaactctagattactgtgtcaacccaatactatttggtcatagatgtaaaaactaccaaataaaagtggattttgtggtctaca

SEQ ID NO: 101 - DNA, 291 bp, Homo sapiens
aaactcaggctatgtatacagtaaccttgtggaactggttcagccagatcttcactttcatgaaagcacagggtctgtccttttctttccagagggctcctctcatattccatcgccagttttcgtcaggagatcgaaggttgtagatgtctgcacgtggcttccttggaggtccagtggtgactccctcttccaaaatccattctgtacccgctggctgctctaacgggcaggacaatagcgtatgaagcctgactgcaactaggagaagtaccacactccgagcaccgc

SEQ ID NO: 102 - DNA, 479 bp, Homo sapiens
  misc_feature 432: n = A,T,C or G
aaatggtattacgtataaattaatataaaatgattacctctggtgttgacaggtttgaacttgcacttcttaaggaacagccataatcctctgaatgatgcattaattactgactgtcctagtacattggaagcttttgtttataggaacttgtagggctcattttggtttcattgaaacagtatctaattataaattagctgtagatatcaggtgcttctgatgaagtgaaaatgtatatctgactagtgggaaacttcatgggtttcctcatctgtcatgtcgatgattatatatggatacatttacaaaaataaaaagcgggaattttcccttcgcttgaatattatccctgtatattgcatgaatgagagatttcccatatttccatcagagtaataaatatacttgctttaattcttaagcataagnaaacatgatataaaaatatatgctgaattacttgtgaagaagcattt

SEQ ID NO: 103 - DNA, 164 bp, Homo sapiens
gtggagccgccaccaaaatgcagattttcgtgaaaacccttacggggaagaccatcaccctcgaggttgagccctcggatacgatagaaaatgtaaaggccaagatccaggataaggaaggaattcctcctgatcagcagagactgatctttgctggcaagcag

SEQ ID NO: 104 - DNA, 261 bp, Homo sapiens
ctgaagtcacacatgaaagaagccatgatcaagcttggtttccacttgctctgcttcttcatgtatctttatagtatgatcttagctttgataaatgactgaagctggagaagccgtggttgaagtcagcctacactacagtgcacagttgaggagccagagacttcttaaatcatccttagaaccgtgaccatagcagtatatattttcctcttggaacaaaaaactatttttgctgtatttttaccatataaagtattt

SEQ ID NO: 105 - DNA, 169 bp, Homo sapiens
ctgtttgcctgcctctcctagcaggaggccagcattcccaaagggattctttagagcactgccaagcccagagagctcctttcctttgtccatacagccctgcagagccacaaacagccgaagaatgtcatttgtcccctcaaagatccggaagatgcgaagatctcgg

SEQ ID NO: 106 - DNA, 389 bp, Homo sapiens
cggtaaagagcttttcaaagagagctttatagacacccacaattgtccccaatctcttcatgatgttgcattaatagttgtttttgtccctttcttggaaatgttaatgccaaagttgcctgaacattgggcggttttcttaatttgaagtataaaaattataaagagtaattccaaaggtattaaaagattgtttaacagtatgtgtggtgatgtcattatctccagagaggcttcaagaaatcctttggaaataaaaagttaaatgtttacatttcatgtggtatttcaggtcttcaggttctgattagcttacttttttcctttgtctttggctgatttctgctttgtagataaataataatagccctgagatgtttctaacattt

SEQ ID NO: 107 - DNA, 129 bp, Homo sapiens
ctgcatcacggggaacacagcatctcctggatgcaggaagctgcaagcatctggaatgcttattaatttaccccacaaataaatacaaaaggtcaatcttcccagtggaaatgattccatcgatttttg

SEQ ID NO: 108 - DNA, 189 bp, Homo sapiens
ccaaagaagaatcatcctttctactccttctctttcgtctggtcactcagaaatataatattatcagctatgattgttgttgcttgtcgcctcacattatttttatccatgtattcaccatagtctattttcccttccaaataaattcgagacccctttttcacatattgatatgccacgtctctgagg

SEQ ID NO: 109 - DNA, 174 bp, Homo sapiens
ggacagaagcacccaacaggactgctcaagccacctgcgaacactgctgctaccatgcccaagagaaaggcaaaaggagatgctaaaggtgataaagcaaaggtgaaggatgagccacagaggagatcagctcggttgtctgctaaaccagctcctccaaaaccagagcccagg

SEQ ID NO: 110 - DNA, 166 bp, Homo sapiens
  misc_feature 26, 35, 37, 46, 48, 89, 123, 149, 157: n = A,T,C or G
aaacatcactggaaagctgaatttanaggaaacantntcagataanantacaatgcccgtgacagccaacattatgtaactgggctgtntgaggttgtttagaaggctagggttaaaaagatngatagacaaaaagatttttaaaaatnacccccanagttgatgc

SEQ ID NO: 111 - DNA, 280 bp, Homo sapiens
  misc_feature 64, 111, 117, 152, 163, 184, 186, 213, 244, 251, 256: n = A,T,C or G
cgtgggcctgggccagagctgtcacaacccatcctcccaggctgggggagagaggacctcctgnaactgacttcttctgtcaggaggactggtttccagccatacctgttntggaanggagaggggctggaggcacccacaggcacaagctnaaggcagcagnttggctaatactgaacaagtngnggggcaaattcctgccctctctctctngcctctgggccgtttggtattaatcacccangggctgntaaancccctcctcttggcacctcaaaat

SEQ ID NO: 112 - DNA, 207 bp, Homo sapiens
ccaatgagaacccaaatccagagtcacagcctgtgaccaggacagctttgctgccaaccggctccgccgcactggcataagtccgacggccaatcgggataaaggaagtagaaccaagcaatagtgggcgtcttgctccattttctctatcacaggcacttagggtttttcctgggagccgtgacaggggtctggagaggcgggtgg

SEQ ID NO: 113 - DNA, 242 bp, Homo sapiens
  misc_feature 83, 110, 123, 141: n = A,T,C or G
cctgctggggaatgtatttgccactaaattccccaagtatgccaacattacaaaaaagataggtttttcatcataattgaatntccacaaacctccccaatcacaagtantataagtggaagnaaaaaatcacattttacngatctcaaacttgtcttcaacatttagttcatcatcttcaaaaaatagctcccctgcctaattcattagctatatgatctaaccaagcagcaacaagatgg

SEQ ID NO: 114 - DNA, 303 bp, Homo sapiens
aaactgccaatcctatagactaggacttgaacatcaaaggaaaaatagacaaagactagatgataaagtcattcaaaagcacagaagcacatcacatacaccagcaaggtttccaactactgcactgattaactagatactctcaatagcttttctatagctcgtcctagaaaaaaaaattaaattttcattttcttacaagttccaggcttaaacaaaggcaaaaattacatgcaacaactgatacactcataagttgcacatatgctccaaggtctttattagataacaataaatgctagc

SEQ ID NO: 115 - DNA, 561 bp, Homo sapiens
  misc_feature 508: n = A,T,C or G
ccacacagactcaccaagccacagacttgtcttccacaagcacgttcttaccttagccacgaagtgaccaagccacacgtactaaaggttgaactcaaagatatgtacagggtattaaacaaataccaaggggaacagttaacttcaatacaaggtcaaaatcagcaacaagttctacaatccagtgctgatatcagatacaagcttcaaggacaatttcttttcgaaggcttattccagtttcgtgaggctagcatgaggtgtgtgcatttgccaggggcaaatttctattctcaattaacccatgcagcaaatgctacgcatccgctgagtccgtttagaagcatttgcggtggacgatggaggggcccgactcgtcgtactcctgcttgctaatccacatctgctggaaggtggacagtgaggccaggatggagccaccgatccacaccgagtacttgcgctctgggggtgcgatgatcttgatcttcatggtgctgggcgccanggcggtgatctccttcttgcatcctgtcgggcaatgccccggataccatgggt

SEQ ID NO: 116 - DNA, 308 bp, Homo sapiens
ctgaggggacctgctaggctttgatgaactgagctgcatcttggatttcgcttcctcttctttctcagccgaggttacggtgattagcaagggcagttgctaccactgaaaggatagaaggaaaaaggcaagggaaaatgatacgtactaagatgcacataggagcactcgatagtagtctatggaccgggccctgggtactgccattatagagggaaggggaagaggagtggtaagggagagagaacactggactaagcctcagcattcagatgttcccagttacaacaccctgaacgatctctagg

SEQ ID NO: 117 - DNA, 160 bp, Homo sapiens
agtgtgctggaattcgcccttattccgatagtgaagggcgaattctgcagatatccatcacactggcggccgctcgagcatgcatctagagggcccaattcgccctatagtgagtcgtattacaattcactggccgtcgttttacaacgtcgtgagaatt

SEQ ID NO: 118 - DNA, 128 bp, Homo sapiens
gttcctttagacaaagttgtgacccattttactctggataagggcagaaacggttcacattccattatttgtaaagttacctgctgttagctttcattatttttgctacactcattttatttgtattt

SEQ ID NO: 119 - DNA, 195 bp, Homo sapiens
ctgtggagcagtatgttccctctgagaagctgagtatctatggtgacttggagtttatgaatgaacaaaagctaaacagatatccagcttcttctcttgtggttgttagatctaaaactgaagatcatgaagaagcagggcctctacctacaaaagtgaatcttgctcattctgaaatttaagcatttttctttt

SEQ ID NO: 120 - DNA, 273 bp, Homo sapiens
ctggaggtgcctcagaaggtgcattctgcttcctgcaggggcttgaaacaccaaggcactccagggatcctggagtcaaagcagcagccccggttgttgcactccttgggggtgacatgggggtagccgcagtccaccctgtccttggctggcacggcacactggtttgcagacaggcccacgtactcctcagcagagctggaggacagcaaggccaggaccagccccagcatgcagagcgctctggcagccatgaccaccgtgggctccggg

SEQ ID NO: 121 - DNA, 83 bp, Homo sapiens
ctgtgaatccaaaagtaagaatttgtgagccaactgggaaataaccacagaatcaactcattttaagtgcaaggaggaaaaat

SEQ ID NO: 122 - DNA, 55 bp, Homo sapiens
  misc_feature 38: n = A,T,C or G
agtgtgctggaattctgcctatatccatcacactggcnggcgctcgagcatgcat

SEQ ID NO: 123 - DNA, 426 bp, Homo sapiens
ccttccatcttcagaagaggcttgtgaggaccatcggttgatgacctcctagtgaattctggctcccattcagagcacagagaaacccacaaaaggggcctgtggctctggttccaggtctcaagggtacagcttggttacatccccaggccccaggctgattctcctgccatcatactgcaagccttcctgtaccactttgacccaggttgaggtctggcggaaaataacctcaaaggcaattaatacaaaaagcttcctgtaagctaagaggggttatcaactatatgtacttatttttccagagattgaagagagaagagaacgagccaaggcttggttttgttttatgttggtggcacatgtagacactttggcataacgaaccccatagagcctgcagcccaatccactctgttttggttt

SEQ ID NO: 124 - DNA, 471 bp, Homo sapiens
  misc_feature 368: n = A,T,C or G
ctgcattctttaacataataaaaaagaacttcaaatgagacaagcaaaaacaagacataagcattgtcaaataaggcacatgtaaaaatctacacacattatccagtgaaagacaatatatatatatttggaggtagaaataattacaaaaatactgacatttctaaagcattagcatatttgttacaaacaatcaccaactaatccccattcagaaaactgctttgtaaaatgattattcaacatcttcagaactacatatttgtggcttcttttttgaaatttcacgtgtgagtatttggagaattcagttagtggcaaaaagttgtccatactatgagaaatgtaatatggaaattataaaaagntataaatgttcataaaccccatggtcatcataatgtaaatgtccttgagtgcaccaagttgatatttcctcatcaattgagagttcacagttcttatttcaca

SEQ ID NO: 125 - DNA, 231 bp, Homo sapiens
acacagaggagcggggcaggcagggaggcaaggactggagctaccttgcttgttgggggactgggtacagttggcaagctgtgtttccatcagctccctgtcctcctttcttccctcgttattgatctatagacattaggaagggagtgagacggctcctccaccatcctcagccagtgcaacccattccctctgcttctctctctctctctctccctccctctccttccc

SEQ ID NO: 126 - DNA, 316 bp, Homo sapiens
  misc_feature 156, 195, 198: n = A,T,C or G
ccatcagattgtcacagacttttataaccctttgatccctaccaacattaagtatgagtttggccctgccatctttattggctgggcagggtctgccctagtcatcctgggaggtgcactgctctcctgttcctgtcctgggaatgagagcaaggntgggtaccgtgcaccccgctcttaccctaagtccaactnttncaaggagtatgtgtgacctgggatctccttgccccagcctgacaggctatgggagtgtctagatgcctgaaagggcctggggctgagctcagcctgtgggcagggtgccggacaaagg

SEQ ID NO: 127 - DNA, 251 bp, Homo sapiens
cctcggggatggtgaatccccggtacttcttacacaccacctgtactatgtgtaactttggcaacaggttgcagtcagccagggtgagctcgttgccatccaaaaacttcctctgagagacaccttcatcttcagcactggtttcatccacttcttctgggaggggggatgttaagtaattgtctaaaaccttcagggctttcaggagtcccttctccagattgtcattgagtgctgggtttgaattcttg

SEQ ID NO: 128 - DNA, 375 bp, Homo sapiens
ccaggggtgctaagcagttggtggtgcaggaggcattgctgatgatcttgaggctgttgtcatacttctcatggttcacacccatgacgaacatgggggcatcagcagagggggcagagatgttgacccttttggctcccccctgcaaatgagccccagccttctccatggtggtgaagacgccagtggactccacgacgtactcagcgccagcatcgccccacttgattttggagggatctcgctcctggaagatggtgatgggatttccattgatgacaagcttcccgttctcagccttgacggtgccatggaatttgccatgggtggaatcatattggaacatgtaaaccatgtagttgaggtcaatgaagg

SEQ ID NO: 129 - DNA, 523 bp, Homo sapiens
  misc_feature 505, 507: n = A,T,C or G
ctgtccaatggcaacaggaccctcactctattcaatgtcacaagaaatgacacagcaagctacaaatgtgaaacccagaacccagtgagtgccaggcgcagtgattcagtcatcctgaatgtcctctatggcccggatgcccccaccatttcccctctaaacacatcttacagatcaggggaaaatctgaacctctcctgccacgcagcctctaacccacctgcacagtactcttggtttgtcaatgggactttccagcaatccacccaagagctctttatccccaacatcactgtgaataatagtggatcctatacgtgccaagcccataactcagacactggcctcaataggaccacagtcacgacgatcacagtctatgcagagccacccaaacccttcatcaccagcaacaactccaaccccgtggaggatgaggatgctgtagccttaacctgtgaacctgagattcagaacacaacctacctgtggtgggtaaataatnanagcctcccggtcagtc

SEQ ID NO: 130 - DNA, 186 bp, Homo sapiens
ggtgtgtctcagctaatccaaagggagtttcagaccagtgcaatcagcagagacattgatactgctgccaaatttattggtgcaggtgctgcaacagtaggagtggctggttctggtgctggtattggaacagtctttggcagccttatcattggttatgccagaaacccttcgctgaagcagcag

SEQ ID NO: 131 - DNA, 477 bp, Homo sapiens
  misc_feature 5, 6, 41, 56, 59, 84, 167, 178, 267: n = A,T,C or G
ctggnnatccccccgatcttcattatcatcatcatccagtnggtccccctcctcancanagtcatctgcacccccctcagactncatcttcacattagtctcatctttcttcacggagctgctgctctgctcctcttctgacttatcattcttcatctctactgctngtttgctctgntccttttcaattttttccaggttttccaggagagaatccactttttgttttatctgggtcagctccttcttaatggcctgaaggtcatntcctttcaactttccagacttggaagatccccgctgtccactcttagaattgaagccacttttgccccttcgtgaagtgtttcctgatacacgctgacgtttcgagggcactacagcccgagcaataggaggaggaggaggtacacgtgctgggtaactgtacatcctatcataatagtcccgttgaaagtcacagtccaagtcaaaaga

SEQ ID NO: 132 - DNA, 263 bp, Homo sapiens
aaaaatacattggaaattctgcatattcccatgatcaaccttattttcaatgcacattacttaaattttgatgacacagttgattctgacaagtcctttttcaagctgaacaccaaaatagggaaactcctgtacatttccatgggccctgttcccattgatgtatactgcttccttactaacagtgagggatgactttcatcagtcttttatcacctgaacagtcttccggccataatgatagtaactataagctgatgcag

SEQ ID NO: 133 - DNA, 243 bp, Homo sapiens
  misc_feature 19: n = A,T,C or G
ctgtaatggtgcgtctaangctagtgttggcacctgttatgtgcattctctctggcattggagtctcccaggtgctgtccacatacatgaagaatctggacataagtcgtccagacaagaagagcaagaagcaacaggattccacctaccctattaagaatgaagtggcaagtgggatgatactggtcatggctttctttctcatcacctacacctttcattcaacctgggtgaccagtgagg

SEQ ID NO: 134 - DNA, 171 bp, Homo sapiens
ccaccagagggcagtgggagccaggtaacaaacttccctttccccactcctccaaccccccaccatctctgcactgcctaaagggatattgccaggtctggaagtgaggaggggacctcagacactggcccagcagtgtttctttctttctctctctctcttttttttttt

SEQ ID NO: 135 - DNA, 231 bp, Homo sapiens
  misc_feature 10, 11, 37, 153, 207: n = A,T,C or G
tgatcgtcgnnactgtggtcctattgaggccagtgtntgagttatgggcttggcacgtataggatccactattattcacagtgatgttggggataaagagctcttgggtggattgctggaaagtcccattgacaaaccaagagtactgtgcangtgggttagaggctgcgtggcaggagaggttcaaattttcccctgatctgtaanatgtgtttaaaggggaaatggtgg

SEQ ID NO: 136 - DNA, 177 bp, Homo sapiens
  misc_feature 168: n = A,T,C or G
ctgtttcagaactttgtgcaggactgcattggctggcttgtttcctgccattgactccttggacaggtgctgatgactttccgccaaacactccacctcagcaaagcgggtgttgagggccatggaagggtgagaagggtcttctgacatgttcaaagtaaagcaagnccggcgcag

SEQ ID NO: 137 - DNA, 181 bp, Homo sapiens
  misc_feature 127, 181: n = A,T,C or G
ttctgatcctgacttcagctcctgaggaagagcctccgaggtcacactcacaggcaacacacttaaaacaatgcaaatgataacaaagacccagggactcgatgatcatggcggctcctttgcccanaatgttattgcagtaggagcatatgcgcttcccactgactgacctgttacgcan

SEQ ID NO: 138 - DNA, 221 bp, Homo sapiens
  misc_feature 83, 156, 158, 161, 187, 213, 215: n = A,T,C or G
catctccattttctgcagggttattcccctccttgccagcatcagcttttccctttttccctttgggtaccttctctcccttntttgcaggggcctttttaggcttgggctctggctttggaggagcaggtttagcaaacaacctcgcggatcttntntgnggttcgtccttcacctttgctttatntcccttagcatccccttcagcctttntnttgggc

SEQ ID NO: 139 - DNA, 521 bp, Homo sapiens
aaatgtcccaggctgccttcctgtcctcccatcctgcatcctgctttctgttccctggataccgtaggatggttttatttcagttcatgcacaaattagtctggacactgtggagtcataacaagagtgggatggaggttccagggccaatcagtttctttggagggaagcttgagaagtaggttagagcaatgcccacaaaagccactgcttctccttcccatccccagcaatgagctaagagccaacctcagccagagagagggtctttgatcacagagggtcagtcagtgggatgtgattagtgggtttggggatggagtcccaggtaaaccagagggcaaagggatcctctgagtcctggcttaagggaatggggtttcaagttgagggttggggacttagggcaggggagcagcaaggtgaggaaaacagaaaggctggcatggcgagcatccttggcaattcaacctgcatgctgttacactagcccccatttctgcctttgctcaatccaatgg

SEQ ID NO: 140 - DNA, 335 bp, Homo sapiens
cgccctctgacttcttgccctttggaaatggtgcagccctctggcatttatcacccccacctgggtcccctgcaacctcccatcaaaggatgacccctaaacacagaggagcggggcaggcagggaggcaaggactggagctaccttgcttgttgggggactgggtacagttggcaagctgtgtttccatcagctccctgtcctcctttcttccctcgttattgatctatagacattaggaagggagtgagacggctcctccaccatcctcagccagtgcaacccattccctctgcttctctctctctctctctctctccctcccttccttccct

SEQ ID NO: 141 - DNA, 189 bp, Homo sapiens
  misc_feature 5, 21, 23, 38, 39, 44, 48, 60, 65, 71, 92, 97, 99, 100, 115,129, 133: n = A,T,C or G
tgttnctgtgctgggaatganancaagggtgggtaccnngcacnccgntcttaccctaantccanctcttncaaggagtatgtgtgacctgngatcncnntgccccagcctgacnggctatgggagtgnctanatgcctgaaagggcctggggctgagctcagcctgcgggcagggtgccggacaaagg

SEQ ID NO: 142 - DNA, 245 bp, Homo sapiens
cctcctgggattcattcctgttgcctggaatcttcatgggatcctacgggacttctactcaccactggtgcctgacagcatgaaatttgagattggagaggctctttacttgggcattatttcttccctgttctccctgatagctggaatcatcctctgctttttcctgctcatcccagagaaatcgctccaactactacgatgcctaccaagcccaacctcttgccacaaggagctctccaagg

SEQ ID NO: 143 - DNA, 264 bp, Homo sapiens
  misc_feature 68, 105, 111, 123: n = A,T,C or G
ccacaattttagagtctaatctggcttcttatattccaatctgctactcttaaaccaacaaacagtantacacagttttattggtgcaaaactaaacaaatccangaaggntattcatataanaatcttcaacacaaattctgcctttatttacaaaatggtctgataaaaatatcgccccccccccatacttacaggtctcttccacaacacacttcacacgttgattttagcaatattaatagcaccattcgtatattattt

SEQ ID NO: 144 - DNA, 180 bp, Homo sapiens
aaaagcaacaagaagaaaaccaaacaatgctgatagactcagaaaaggagtggggggcagtcaccactgctgggcgtggcatccgccttgggcctttctccgaccttctggtgtggccgccctgggggccaggccctcgccatcctccccatccttgttctcagcaaatggcattagcag

SEQ ID NO: 145 - DNA, 167 bp, Homo sapiens
  misc_feature 20, 33, 40, 43, 149, 153, 167: n = A,T,C or G
agtgtgctggaattctgcanatatccatcacantggcggncgntcgagcatgcatctagagggcccaattcgccctatagtgagtcgtattacaattcactggccgtcgttttacaacgtcgtgaatagccatataagaatactgattntctntttaccttctctan

SEQ ID NO: 146 - DNA, 248 bp, Homo sapiens
cccggcctcacatgacccctgctccagcaacttgaacaggacaagcagcagctacatccttaaggtcgggaaagtaagatgaggatttggatcctgcattgccctgcctcccaccctatctctccccaaattataaacagccatccttgggaagcagcagaagttaagacgtctccccactgccctagtgacatacacaccaacaggagagcatgttcagatggcacagaatccagggactgcatttc

SEQ ID NO: 147 - DNA, 162 bp, Homo sapiens
ctgacacaggtgtagggggatgggaagccacagacagcacagaaggggcgctggggccgcgatgggggtcccgcacaggccgtcaggtagttagggccctcggccacactcaagttctgctcctccaacagggcctgaaagttttttcggaagcgaagtttt

SEQ ID NO: 148 - DNA, 560 bp, Homo sapiens
ctgatgcagtccgagagctagatggaagaacactatgtggctgccgtgtaagagtggaactgtcgaatggtgaaaaaagaagtagaaatcgtggcccacctccctcttggggtcgtcgccctcgagatgattatcgtaggaggagtcctcccctcgtcgcagatctccaagaaggagaagcttctctcgcagccggagcaggtccctttctagagataggagaagagagagatcgctgtctcgggagagaaatcacaagccgtcccgatccttctctaggtctcgtagtcgatctaggtcaaatgaaaggaaatagaagacagtttgcaagagaagtggtgtacaggaaattacttcatttgacaggagtatgtacagaaaattcaagttttgtttgagacttcataagcttggtgcatttttaagatgttttagctgttcaaatctgtttgtctcttgaaacagtgacacaaaggtgtaattctctgtggtttgaaatggatcatacgaggcatgtaatacccaagaattgttactttacaatgttcccttaagcaaaa

SEQ ID NO: 149 - DNA, 409 bp, Homo sapiens
  misc_feature 403: n = A,T,C or G
ctgtgagctctgcttggtccgaataaagtcctctgggggctccctgggccctgatgggcagcctggcgggggtgtagaaacctggtagggaagactctgcccccttctctcctcccagggcctccctctcaatccagagccctcactgagaatgatcatgaagggctgtgattctgtaacccagtggagcagccatcagagcccagtgctatgggctttgtgcttagtatccagcctgggaagggctcagtgcccttatgatgggggcaggtagaggtgaggctgcaggaagaggcaggtgtgagttgaccacgttcctccctcctcaggtcatgctctgcaagcattccatctttttcagctccaccccttttctccaggatcagtgtggtccccacagcancctcca

SEQ ID NO: 150 - DNA, 512 bp, Homo sapiens
  misc_feature 348, 409, 508: n = A,T,C or G
ctgcagcctgggactgaccgggaggctctgattatttacccaccacaggtaggtcgtgttctgaatctcaggttcacaggttaaggctacagcatcctcatcctccacggggttggagttgttgctggtgatgaagggtttgggtggctctgcatagactgtgatcgtcgtgactgtggtcctattgaggccagtgtctgagttatgggcttggcacgtataggatccactattattcacagtgatgttggggataaagagctcttgggtggattgctggaaagtcccattgacaaaccaagagtactgtgcaggtgggttagaggctgcgtggcaggagaggttcanattttcccctgatctgtaagatgtgtttagaggggaaatggtgggggcatccgggccatanaggacattcaggatgactgaatcactgcgcctggcactcactgggttctgggtttcacatttgtagcttgctgtgtcatttcttgtgacattgaataantgag

SEQ ID NO: 151 - DNA, 235 bp, Homo sapiens
  misc_feature 19, 29: n = A,T,C or G
ccacagaaactttttcccncttaacattngttaacagcctgcaaaactaaacttgtacatggcagtggttcccagacttttgtattttatggaccggtagtaatatttccaaaaatctggggtactataaggttgccaatttaccttgccaaggaatccgaataaatcactgtattatcaccatttttttcataaaaggaaaggacaatctatctctgaataagaggagtccttt

SEQ ID NO: 152 - DNA, 133 bp, Homo sapiens
aaattcaaaaacaattcttaaaactgcatttagagtcaagacccttttgtattataaaaatcacaagtatttctaagagacaaaaatacttctaggttaactagaccagatctgactttggactttattcttt

SEQ ID NO: 153 - DNA, 289 bp, Homo sapiens
  misc_feature 288: n = A,T,C or G
aaatgttcctcctgtacttgtgttgtctgtgaccgcttatagagttttattgttattggtgtttacctgaatacctatgcgtacacacacacatatttccttaatacttctgaactcattatcttttagaataataatactactacactttaccagcaattaacttcttcctacccaaaatgtttttcttcctgtctgagaatggaactaatttgtcttattcgtgcttatatctgtattaaatgcaataaagttagtttttgaaatgtaaaaaaaaaaaaaaaaacnt

SEQ ID NO: 154 - DNA, 472 bp, Homo sapiens
cacgttttgatagaccacctgcccgacgtccctttgatccaaatgatagatgctatgagtgtggcgaaaagggacattatgcttatgattgtcatcgttacagccggcgaagaagaagcaggtatttattttaataaaggaatggttggtattctagttaatcaagtaattcttttattagcaaggcagaaactagtgtttttctataaacttgaatgttaattgtacaggtgtattttacaatttttgtttaattaaaaaaatgttactatattaataatcaacctggtcaaaacctttcaggtttcttcgtttgagtcagtcgccttgattcagaatgtcacgagccttatgatatcatgctgaggcgccttgcaaatccgacaattaagatcctcctagaccttgaggtgatcagcataagaggccagatcccctcgagtcatctacacctagcttcaccttattcttt

SEQ ID NO: 155 - DNA, 381 bp, Homo sapiens
  misc_feature 170, 181, 198, 212, 324: n = A,T,C or G
cgtggtcgcggccgaggttragcctggcccagaagcgktkttytyamargmcctyacygakataaaywacaywtgscatctyctgtactgggscarggatttctctacawrarcccctgcccctctgttggaggcacatactttaagaataaacgaggagagagggacangacaaartgtnaagggatggagaacttncccaggccgccccnttaatgggacwcacatgsacmcatgattaacaawtggacctgcccgrgcrkscrtttaaaagggcsaattctgcctatatycatcacactgrcrgtcgattgagcatgcatntacagsgccarttcgccctatagtgagtcgtattacaattcactggccgtcgtttta

SEQ ID NO: 156 - DNA, 407 bp, Homo sapiens
  misc_feature 176, 178, 179, 185, 187, 188, 259, 284, 352: n = A,T,C or G
tcgagcggccgcccgggcaggtccaacatsmcgkgcammytattgcmctggmtactgmatawwcagaaggtmtgsgtgwcatgkawttkwagsaacmckacctaccarkkgcccacgcttkgawaagrawcttgcgccytwgymtamcstsacgscmtccaccgcwggggatcatncnntattgntnnactcatrctattcgtgtacccttacracaatrcctcacaccmaatgttktacctmtgcctctacsactmtnacggacwrttyatctcatrtcyrtnccacwksmtgacggtmgaamctgcatctmaacgggccatattttcytatwgggagtcatgwtacaatncaytgrmcratakaatacttctahtggttcacttcggccgcgaccacgctaaggg

SEQ ID NO: 157 - DNA, 192 bp, Homo sapiens
ctggcacaacaatgaaagtgtcagactttctgaaagtactcgagaaataatgaataaattcttaatgttttcccctccaccgcccttttttattctccaagattaggaattactacggattaggtttttgaaaataaagtttcctttttggaaaatggtctacattcagaaaatgtcttagaacaagcattt

SEQ ID NO: 158 - DNA, 216 bp, Homo sapiens
aagtaagagctggtgtctgattgttaagtctaaatatttccttaaactgtgtggactgtgatgccacacagagtggtctttctggagaggttataggtcactcctggggcctcttgggtcccccacgtgacagtgcctgggaatgtattattctgcagcatgacctgtgaccagcactgtctcagtttcactttcacatagatgtccctttcttgg

SEQ ID NO: 159 - DNA, 263 bp, Homo sapiens
ccttggttacacaactccagcaaccgggccccaaatccactatctgtgcaatgcagcacatgcgcagcaatgctattaaactgctcttggagaaattccaggtttgtccggatgatgtccacacctggctgaacctgcaccaaggaaaaactctcccgcacatactcttctagccccgtgatcaatgtgtgggttgccatccggatgttactgggtgtgggctcctgaccacccaggtagtgctggtggaagaaggatcgcag

SEQ ID NO: 160 - DNA, 279 bp, Homo sapiens
  misc_feature 166: n = A,T,C or G
ctgtccaatggcaacaggaccctcactctattcaatgtcacaagaaatgacacagcaagctacaaatgtgaaacccagaacccagtgagtgccaggcgcagtgattcagtcatcctgaatgtcctctcagagccacccaaacccttcatcaccagcaacaactccnaccccgtggaggatgaggatgctgtagccttaacctgtgaacctgagattcagaacacaacctacctgtggtgggtaaataatcagagcctcccggtcagtcccaggctgcag

SEQ ID NO: 161 - DNA, 248 bp, Homo sapiens
ctgctagttgtgcttgctgggataaatcttcgatcttggcttccccaaaaactatgtaagtatctgaagcagggctcttgtagacatctggttttgtgatgacaaagaggatattcttagatttccggatagtgactctagtaactcctgtaacctgcccaaagggcccagtttggacatagccttccgtgccttcttttcactccgactctgttttgctttactgactggttcttcatcaatttcag

SEQ ID NO: 162 - DNA, 500 bp, Homo sapiens
aaatgttgtatcaaaagagattgataaaggaatgtataactcagcaaaggatgcttctactgtaaattcccaccattaaaagtactggattctataggtccaccattaaaagctggtatgggacaccaatttatacacataagggttagattaaaattttaattttttggttgatattaaactgaaatttatataactgaggtctgaatcttaaaaaaagtaaatgataaaaatttaatatagttaactgttcactgatatgtctattcacttcatcataacctatatatttaattaaaaatcaaattatgagtctgcaaatcagatgctatcaagcaaattgccatccagggtccataattctttttatatttttatctcagatgaatatatacgattcagtaaattttaatgttccaaattgttctaaaaaaaaaaattatcaaaagcttccagttaacagttggctaattcatttgcccccaacgaactacctgttt

SEQ ID NO: 163 - DNA, 164 bp, Homo sapiens
  misc_feature 30, 48, 54, 58, 72: n = A,T,C or G
cttctccaagtgctcccggattttgctctncagcctccggttctcggnctccangctnctcactctgtccangtaagaggccaggcggtcgttcaggctttgcatggtctccttctcgttctggatgcctcccattcctgccagacccccggctatcccggagg

SEQ ID NO: 164 - DNA, 372 bp, Homo sapiens
  misc_feature 163, 315, 369: n = A,T,C or G
aaaaagtacatctctctccctcctcccccacatgcacaaggctcacatctcattatggtgcggcccatgtacattaaagtgtgatacttggttttgaaaacattcaaacagtctctgtggaaatctgagagaaattggcggagagctgccgtggtgcattctnctgtagtgcttcaagctaatgcttcatcctctctaataacttttgatagacaggggctagtcgcacagacctctgggaagccctggaaaacgctgatgcttgtttgaagatctcaagcgcagagtctgcaagttcatcccctctttcctgangtctgttggctggaggctgcagaacattggtgatgacatggaccacgccatttntgg

SEQ ID NO: 165 - DNA, 264 bp, Homo sapiens
atttcaactcatagcttataatgatgccatttctccagctgtgcaagggctttacaaaaactgtgccaggacttcccatgaggctggattgcttgattcatgttttatgagccccacaatactgaagctccttttccagggacttggcataggcagtcaattccacatttgggataggtcctctctggaagtgaatgtcaggcagtgacatccaagtttctgcatgcagtgggttaacagccatgtttagggggaacatgattt

SEQ ID NO: 166 - DNA, 342 bp, Homo sapiens
  misc_feature 107, 248, 262, 298, 329: n = A,T,C or G
ccactggctgagttattggcctggcaggtatagagtccgctgttcttctcagtgatgttggagataaagagctcttgtgtgtgttgctggatgttcccatcaatcanccaagaatactgtgcaggtgggttagaggctgcatggcaggagaggctgatgttccccctgacggtaataggtgtatgagggggaaatggtggggtcgtctgggccatacaggacattcaggatgactgggtcgctgtggncaacacttaattcnttctggattccacactcatagggtcctacatcattncttgtgacactgagtagagtgagggtcctgntgtcattggacag

SEQ ID NO: 167 - DNA, 296 bp, Homo sapiens
ctgggcggatagcaccgggcatattttggaatggatgaggtctggcaccctgagcagtccagcgaggacttggtcttagttgagcaatttggctaggaggatagtatgcagcacggctctgagtctgtgggatagctgccatgaagtaacctgaaaggaaggtgctggctggtaggggttgattacagggttgggaacagctcgtacacttgccattctctgcatatactggttagtgaggtgagcctggcgctcttctttgcgctgagctaaagctacatacaatggctttgtgg

SEQ ID NO: 168 - DNA, 193 bp, Homo sapiens
  misc_feature 12, 29, 30, 37, 44, 52, 57, 61, 140: n = A,T,C or G
atgggccctctntgctgacaatgaggttnnaggaggngtgctgnaatttttnagaanccantcatgcctacactggtgagggaaaatacctttggtgtatgacccctcactcccactccagggtaaagggaacattttcngaccttagaggtggaactgtcttcctgggaaccattctccactcccacctcat

SEQ ID NO: 169 - DNA, 106 bp, Homo sapiens
actcaagtaaatagaaaggcagctttcaatcacaaatcagtttttcagattttactgtggaagcatatttaatgcacacatttgaatgtttcacataaataatttt

SEQ ID NO: 170 - DNA, 428 bp, Homo sapiens
aaactgccaatcctatagactaggacttgaacatcaaaggaaaaatagacaaagactagatgataaagtcattcaaaagcacagaagcacatcacatacaccagcaaggtttccaactactgcactgattaactagatactctcaatagcttttctatagctcgtcctagaaaaaaaattaaattttcattttcttacaagttccaggcttaaacaaaggcaaaaattacatgcaacaactgatacactcataagttgcacatatgctccaaggtctttattagataacaataaatgctagcactttgtcactgccatcagattttcttatagtcttagagtcatgtaaataaaagtccataatgaaattaaagaaaattaatttttctaatcttagatcagttccatagaaaactattaattttttt

SEQ ID NO: 171 - DNA, 502 bp, Homo sapiens
  misc_feature 160: n = A,T,C or G
aaactattttcttaaagagacttcctccactgccagagatcttgaatagcctcttggtcagtcatccggaagcaattcttcacataattgatgaatttggcttccactttgggaagagaaccacctttttctatacttgcttgcatttttgctttaatgncttctacagaactaggtccttttggtgttttaggagttttttcctgtttcttgaaggattcttgtccttttgatcttggtgttgatgatggttttgagtcttttccattctgatttgacttttgtgcatttttggctggagtatctcgtatagatttcttcactggcgctttttcttcagcttcctcatcatcaaaatcatcatcatcatcatcttcatcatcatcctcttcatcatcatcgccatcatcttcatcagcagcaagttttacttttttctgtggaaccttgctaccacctccaggggcagaccgctttccagatatacttaagagtttcacat

SEQ ID NO: 172 - DNA, 285 bp, Homo sapiens
  misc_feature 203, 219, 242, 243, 256, 265, 267, 271, 280: n = A,T,C or G
atwctccaagcttggtaccgagctcggatccctagtaacggccgccagtgtgcccattttggaktgysymcattakgtwgcaatgwkgaaaycaccaaggmctttgtggaraaaatggagggggtgtgagggaatatccactgaggggcwcattttatggcctytgtcacttkcwcatmggccatctcaagctctttgtgganaaaatggagggggtgngagggaatatccactgaggggcnnattttatggcctntgtcacttncncatnggccatctnaagct

SEQ ID NO: 173 - DNA, 593 bp, Homo sapiens
  misc_feature 20, 159, 534, 547, 586: n = A,T,C or G
aaataaaaagagatccaaancaagatcctcactaccccctacccctcaactaaccccctttagggccacattttcttcttgctcctaagaaaaaaatttggaattttgaatattctcggttttctgtgcacacctggaattgggcaaatgtgttcaagntcagccagcattttctgtagacatcatcaaaagcaggcacttggggattctgggctttgagtacaaaccacggatcttgtgtcagaaacacatgttgagactcctccattccttccagaattttcagagatgaggtagacccacctcaatcatcctcaccatcagtttgctaaattgccaggctcaatgacaagctctcctgccatctccaagcccacttttcatagttccgctctgtctttggctgcagcactttaggcactattctaagtcctggagtatatcactcttgcttcagagctaaataaacattaatgaacacacttactcagaacaagtcactggatagctgcccattgcaagttacatactcangagaatgaaaganggaagccattaaaggtcttcagagtagacaataccctantcaagaa

SEQ ID NO: 174 - DNA, 112 bp, Homo sapiens
ccattcttttatcttgggtccatgtgagtgacagaaatggtgcggcctgggaaagatctccctcctttacattttctcttctccctcctcctccttattctaaaactgtgcc

SEQ ID NO: 175 - DNA, 419 bp, Homo sapiens
ccagagatgctggacttgcctaaaatatattcctgagatttcctcctggcctttcctggttttcatcaggaaggaaatgacaccaaatatgtccgcagaatggacttgatagcaaacactgggggcaccttaagattttgcacctgtaaagtgccttacaggggtaactgtgctgaatgctttagatgaggaaatgatccccaagtggtgaatgacacgcctaaggtcacagctagtttgagccagttagactagtccccggtctcccgattcccaactgagtgttatttgcacactgcactgttttcaaataacgattttatgaaatgacctctgtcctccctctgatttttcatattttctaaagtttcgtttctgttttttaataaaaagctttttcctcctggaacagaagacag

SEQ ID NO: 176 - DNA, 234 bp, Homo sapiens
ctgtgcctcggatggtgcgctcgtgccaaggaggctccagccataggcgcctagtgtagccatcgagggacttgacttgtgtgtgtttctgaagtgttcgagggtaccaggagagctggcgatgactgaactgctgatggacaaatgctctgtgctctctagtgagccctgaatttacttcctctgacaagttacctcacctaatttttgcttctcaggaatgagaatctttgg

SEQ ID NO: 177 - DNA, 147 bp, Homo sapiens
aaaagtttccctagcgggccattccttagcaaaatgttggaatccctgttgctacattgactaaaaggtcatgatgaatggaatatgtaagacttggctcatagaaacctaatcagatggttagaggtgttggcagtttaggacctg

SEQ ID NO: 178 - DNA, 156 bp, Homo sapiens
  misc_feature 4, 16, 17, 41, 45, 101: n = A,T,C or G
ctgngatgtaaaccanncactccacctccatcttcctcttntgcnaagaatcgaggaagtcttgccactctgctgggtaaaagcgtttatagacattgatnttactccgaatctgttttggggtatcttgatagtaattcttctcatcacgggcca

SEQ ID NO: 179 - DNA, 200 bp, Homo sapiens
ctccatgaccaagatctatgggggacgtcagagaaacggcgtcatgcccagccacttcagccgaggctccaagagtgtggcccgccgggtcctccaagccctggaggggctgaaaatggtggaaaaggaccaagatggcggccgcaaactgacacctcagggacaaagagatctggacagaatcgccggacaggtggcag

SEQ ID NO: 180 - DNA, 230 bp, Homo sapiens
  misc_feature 179, 192: n = A,T,C or G
cyrcygsttswcatmttrrctyatgggsctkmtatctycctsctcctctgagtsataacctrtakgmagrgcasgtggggstgtctttgkrgscttycakgggasmctmaagamwaaaagasatgtsagcaaaagaatctatattaacmtatkccaatrtgtacccctggacataaatnaggtgatycwatnkctgcccagagtggagcttstgthtttccatacaatgg

SEQ ID NO: 181 - DNA, 273 bp, Homo sapiens
ctggaggtgcctcagaaggtgcattctgcttcctgcaggggcttgaaacaccaaggcactccagggatcctggagtcaaagcagcagccccggttgttgcactccttgggggtgacatgggggtagccgcagtccaccctgtccttggctggcaccggcacactggtttgcagacaggcccacgtactcctcagcagagctggaggacagcaaggccaggaccagccccagcatgcagagcgctctggcagccatgaccaccgtgggctccgg

SEQ ID NO: 182 - DNA, 132 bp, Homo sapiens
cctttgtccatcatgccagggaagccaaccccaccatcccacaagttcatgctaggggtgctgaggaacaaggctgtcctaggattggaccctccatcctggacaggggtcctggggaggatgaggctgagg

SEQ ID NO: 183 - DNA, 389 bp, Homo sapiens
accataagtagatccatcatgttggaggattttaatgacatttaggatattcttgccacaataacatgcaatcagtgcatttcctacatggctctattacggcaatgaatcaaattatagaaatactataagtgaacttacttaataaaggatatcatacgacataaacaatccatgcctgctgtagatgcatgcagcttttcatttttgttatgaagcagcaccagaatagtaaaactgcttggttactcaatcagatttcaccatgacaagaattggttacctcgtaccattttctaaaagctttttgatgtaaataactaatatgagtaacaggagctttataaccatttataactcaaaagctgtatacatctaggtttgagaag

SEQ ID NO: 184 - DNA, 329 bp, Homo sapiens
  misc_feature 150, 200: n = A,T,C or G
ccaagactctaggtcgagagttccacaggattgcacttggaggagtatgtgatcagtctgacattcgaggacacaggcgcacctatgttggcagcatgcctggtcgcatcatcaacggcttgaagactgtgggagtgaacaacccagtgntctattagatgaggttgacaaactgggaaaaagtctacagggtgatccancagcagctctgcttgaggtgttggatcctgaacaaaaccataacttcacagatcattatctaaatgtggcctttgacctttctcaagttctttttatagctactgccaacaccactgctaccattccag

SEQ ID NO: 185 - DNA, 221 bp, Homo sapiens
aaatgtctgcatgcagccagccatcaaatagtgaatggtctctctttggctggaattacaaaactcagagaaatgtgtcatcaggagaacatcataacccatgaaggataaaagccccaaatggtggtaactgataatagcactaatgctttaagaatttggtcacactctcacctaggtgagcgcattgagccagtggtgctaaatgctacatactccaa

SEQ ID NO: 186 - DNA, 173 bp, Homo sapiens
aaaatcactggcatgttgttggagattgataattcagaacttcttcatatgctcgagtctccagagtcactccgttctaaggttgatgaagctgtagctgtactacaagcccaccaagctaaagaggctgcccagaaagcagttaacagtgccgccgggtgttccaactgttt

SEQ ID NO: 187 - DNA, 239 bp, Homo sapiens
  misc_feature 155: n = A,T,C or G
ctctgctcagcctggtgaaccacacaggccagcgctctgacatgcagaaggtgaccctgggcctgcttgtgttcctggcaggctttcctgtcctggacgccaatgacctagaagataaaaacagtcctttctactatgactggcacagcctccanggttggcgggctcatctgcgctggggttctgtgcgccatgggcatcatcatcgtcatgagtgcaaaatgcaaatgcaagtttgg

SEQ ID NO: 188 - DNA, 499 bp, Homo sapiens
cctgaagaggtcacagactggctgcaggcagagaacttctccactgccacggtgaggacacttgggtccctgacggggagccagctacttcgcataagacctggggagctacagatgctatgtccacaggaggccccacgaatcctgtcccggctggaaggctgtcagaaggatgctggggataagcccttaggcaccagcttagacacctccaagaaccaggccccgctgatgcaagatggcagatctgatacccattagagccccgagaattcctcttctggatcccagtttgcagcaaaccccacaccccagctcacacagcaaaaacaatggacaggcccagaggctgaagcaaacagtgtcccttctggctgtgttggagcctccccagtaaccacctatttattttacctctttcccaaacctggagcatttatgcctaggcttgtcaagaatctgttcagtccctctccttctcaataaaagcatcttcaag

SEQ ID NO: 189 - DNA, 212 bp, Homo sapiens
  misc_feature 160: n = A,T,C or G
cctttttatgcattaaattgtacatggcaaataaatcccagaaggatctgtagatgaggcacctgctttttcttttctctcattgtccaccttactaaaagtcagtagaatcttctacctcataacttccttccaaaggcagctcagaagattagaaccnagacttactaaccaattccaccccccaccaacccccttctactgcctacttt

SEQ ID NO: 190 - DNA, 221 bp, Homo sapiens
  misc_feature 158, 185: n = A,T,C or G
cygsatkccacmwrrmacaysymtgmtgtttyctgraarcacgggcctcatcgccttaagtacttctgtttgtgcccttttgcttaccccattmccttccacatattcatagcttattcatctcggaccttgtgccacactmtmcaaayacattacangggacctgattgctacacgtttagaangcgaatgctgcatactgcttgrcmtkgacctgcccg

SEQ ID NO: 191 - DNA, 438 bp, Homo sapiens
  misc_feature 131, 132, 145, 146, 149, 151, 153, 170, 173, 174, 215, 338,383, 390: n = A,T,C or G
cykytcmataacaacattrtgakgawttatytctwatctgrggtrtkawwtywmyaamtytattcatcacwgaaayracttcaagggmctratyrtgaacaccaaatktayyatgaatatgcmytkwamtnnkkcytycccctgnnatntngnactttgggactccctantannaaaagscatcctctagagagratacctatsatccatgtgmncttgtgaagagtgamagctcacatgactrracgcataccctatractatatcaccmtwacgsccaaactkgtcaatctccatcacactgatrraygctmctatatgcataatagagartmctntcctgactcwtctgatcagctatacttatggctttgcratccatntcgcgcnggcgggcgagctcagatgctccagcatggctggctgaggaggcgggca

SEQ ID NO: 192 - DNA, 287 bp, Homo sapiens
  misc_feature 70, 71: n = A,T,C or G
gcttggtaccgagctcggatccctagtaacggccgccagtgtgctggaattcgcccttgcggccgcccgnncaggtaaagctaaataatctgatgactcttgaaagtttaattggtagtatgacatttatgtttttttcccccagactcacagccaatacaaagttttgagactcctaaatgttaatatttttgctgtttttctgagctgtttttttatttacttaccacctaagctgcggatcaaaaaagggaattcttccattagaaatttgtagtgttgtgtgg

SEQ ID NO: 193 - DNA, 276 bp, Homo sapiens
  misc_feature 20, 38, 59, 123, 181, 192, 248, 265, 274: n = A,T,C or G
ctggggccactgtcggcatnatgattggagtgctggtnggggttgctctgatatagcanccctggtgtagtttcttcatttcaggaagactgacagttgttttgcttcttccttaaagcattngcaacagctacagtctaaaattgcttctttaccaaggatatttacagaaaagactctnaccagagatcnagaccatcctagccaacatcgtgaaaccccatctctactaaaaatacaaaaatganctgggcttggtggcgcncacacctcngg

SEQ ID NO: 194 - DNA, 398 bp, Homo sapiens
  misc_feature 381: n = A,T,C or G
ctgctggccccggccaacttgcttgctaaaatcaacgggaaggacagcattgagaaagagcatgtcgaagagatcagtgaacttttctatgatgccaagtcctccgccaaaatcctggctgaccagcaggataagtacatgaagtgagatggctgagggtttcagcagtaagagactccccaggtgtgcctggcctgggtccagcctgtgggcgcttgcccctgggcttggggctgccgtccccactcaggcgtggtctgcagcgcttgtcagttcagtgtggaaagcatttctttttaagttatcgtaactgttcctgtggttgctttgaaagaacccttccttacctggtgtgttttctataaatcttcataggtattngaatctctctctctctc

SEQ ID NO: 195 - DNA, 304 bp, Homo sapiens
ccacagcagtgaccagtgctgccccttttccactgccatcttctgacagcatgaatgtcacatcacatcgaggggctagttccttcacagtttcctgcaatattctagaaaagtgagggtgcagcttgtacagggtgccgtccacacccacagtgatcctcaggtgctctagcccctggtcttctctccttttttccactatagcggccaggccagcaccgcagagctgggccgcccgccgggacacggctccgcacacctccttcaccacgatgctgtcctcacacgtgctgtccaggcccag

SEQ ID NO: 196 - DNA, 140 bp, Homo sapiens
  misc_feature 2, 111, 113, 116, 127, 135, 137, 138: n = A,T,C or G
antgctgaattatcttaagagagatgttaagcccactttgttcttttaatgtaatggagcttatgggtagaagaccatgtctactaattacaaaaaaaaaaaccatgcatngntgnttttcctaccncttccagnannaa

SEQ ID NO: 197 - DNA, 404 bp, Homo sapiens
ctgaagttcattacctgaaggacgcctcatcatttcattccttggctccaaaccttctgctgcctctaagataaaagctcaacttcttaacaatgtacagtgtgcaacttccaacctttttatctgttctctccaccttcagtttagcgtcattccaaaaccacacccttgcaaagctttgtactccgcaccccagatgatctccaggcagctcagatctctttcctgcctttgccctgcactgttccccggtacttcctcctttattgtagcactcagctccccagccaatctgtacatccctcagaggcagcgatctgatgaattggtttttgaatcccagaaagggtctgccatggagttggcagtcatcacggtagatggcgtatgattttgctgaattt

SEQ ID NO: 198 - DNA, 381 bp, Homo sapiens
  misc_feature 359: n = A,T,C or G
gagctcggatccctagtaacggccgccagtgtgctggaattcgcccttagcgggggcccggccktaggtmhrmkmtaasctrkwawtskkbagycmvscagmamrhkwdywydvmkgyaawckkyttmwyymraakwkaycaysrwwcawcwcrdhrkhmkrgsaavahksaksaraaacmwctgactggcmkatagmkrttwmswyytctcactatatgaaacaaacttttcattactargaagggwaaactataacttcaatasacaccaacwcwramrgacwatattayagatatccataacactgkcggtckgckagcatgcatctagagggccaaataccayctatwatgaganggatgacawkcatctggaccgt

SEQ ID NO: 199 - DNA, 205 bp, Homo sapiens
  misc_feature 136, 176, 193, 197, 203: n = A,T,C or G
ccagcaatcggaagtgagcaaaactgccgcaagtctgcagcccggcgccaccatcctgcagcctcctcctgaccacggacgtttccatcaggttccatcccgaaaatctctcggttccacgtccccctggggcttntcctgacccagtccccgtgccccgcctccccgaaacaggntactttcctcggccccntccntcgggntg

SEQ ID NO: 200 - DNA, 323 bp, Homo sapiens
aaacttgacaatcattacactaaaacagatttgataatcttattcacagttgttattgtttacagaccatttaattaatatttcctctgtttattcctcctctccctcccattgcatggctcacacctctctgtctgttaaactgacgaccacggacaccttgtctcaatgttgtctgaagtcttactcgtctgaaaggctttggttgactactactagtatctacagatgagctagaaggaggatcctggctggtggaggggagatctgactcatcagatgcttgaaccggctcttcttcctgctggctatcaatttctagg

SEQ ID NO: 201 - DNA, 283 bp, Homo sapiens
ctgactctgttattgtttccttcttcttttccaattttttactctgtttttccacttctgccttcagtctcttgtacttgtctgtcctgtaaaccaggacccaggttatgccctctgcgagcagagccgtgcacacagagataaaaacgatgaggagagtgtcccgcgaacatagtgctcatctcgcaccttcgtctctgcactctcacccgccagggggaaagcgctctacagccaggaaaagtgaagcgaaaacggcttccgtagactccgccaccaccga

SEQ ID NO: 202 - DNA, 211 bp, Homo sapiens
cctttttatgcattaaattgtacatggcaaataaatcccagaaggatctgtagatgaggcacctgctttttcttttctctcattgtccaccttactaaaagtcagtagaatcttctacctcataacttccttccaaaggcagctcagaagattagaaccagacttactaaccaattccaccccccaccaacccccttctactgcctacttt

SEQ ID NO: 203 - DNA, 125 bp, Homo sapiens
  misc_feature 28, 40, 55, 65, 71: n = A,T,C or G
ccttgtctcccagcttaatagaggagcngtgcaatgctgnggggtgtacactatnacttgacctntcctangtgctgggcaccgagcttgccctcagcaaatactggctggtaagagactgaagc

SEQ ID NO: 204 - DNA, 211 bp, Homo sapiens
cctttttatgcattaaattgtacatggcaaataaatcccagaaggatctgtagatgaggcacctgctttttcttttctctcattgtccaccttactaaaagtcagtagaatcttctacctcatagcttccttccaaaggcagctcagaagattagaaccagacttactaaccaattccaccccccaccaacccccttctactgcctacttt

SEQ ID NO: 205 - DNA, 197 bp, Homo sapiens
ccaatgtggttggtcttcagcttgcagttagccaggttccataccttgaccagcttgtcccagccacaggagacgatgatagggttgctgctgttgggcgagaagcggacacaagacacccactctgagtggctctcatcctggacagtgtatttgcacacacccagggtattccatagcttgatggttttatctcg

SEQ ID NO: 206 - DNA, 323 bp, Homo sapiens
ctgacacttcatggcttgaggtgctcctgtgggatcagcatttgccatctttcatgatctggatgtcctgtttggtttttatccgggccaagcagagctggcattcattcgtatatgtgagcccatcagtgccgcagaccaggttggacatctgggaacaggttggagactctaccatgtgttcacagatgggcattcttgagaaagggagctttcctgctgccactggcacttccctgtccacaacaaggagggcagccaaggccagggcgattatccactggcggacggccatgctgatcctgggatagtgtagcctgagc

SEQ ID NO: 207 - DNA, 185 bp, Homo sapiens
ctgttttaattcaatcccacgcccctgtccagcaggaaaccccttatagaaaacccaaatcctcatcttggagtttctccttcagccagggcagcacttgaaagaggttgatgtgaaagtctcgggcgtgagcaggtacctgcttttgccgcttctggtttttgcagacatccactactccccag

SEQ ID NO: 208 - DNA, 209 bp, Homo sapiens
aaagggtcctttgtagcaatctccatttttgcattagaccagcgtggtacttcaactaccatgtgaaacacatccttatctgcataaattggaatatcatgaaatggagatatatattgtcctttctcatttttgaggaagactcggtactccagggagaaggggcgcggcgcgctcctcggtgctgaagccgctcatagtgccggagg

SEQ ID NO: 209 - DNA, 344 bp, Homo sapiens
ctgtccaatgacaacaggaccctcactctactcagtgtcacaaggaatgatgtaggaccctatgagtgtggaatccagaacgaattaagtgttgaccacagcgacccagtcatcctgaatgtcctctatggcccagacgaccccaccatttccccctcatacacctattaccgtccaggggtgaacctcagcctctcctgccatgcagcctctaacccacctgcacagtattcttggctgattgatgggaacatccagcaacacacacaagagctctttatctccaacatcactgagaagaacagcggactctatacctgccaggccaataactcagccagcgg

SEQ ID NO: 210 - DNA, 179 bp, Homo sapiens
ctgggtcacatccatccctccattcatccttccatccatctttccatccattacctccatccatccttccaacatatatttattgagtacctactgtgtgccaggggctggcgggacagtggtgacatagtctctgccctcatagagttgattgtctagtgaggaagacaagcattttt

SEQ ID NO: 211 - DNA, 516 bp, Homo sapiens
  misc_feature 1, 431, 511: n = A,T,C or G
ncgaggcctgtccaatggcaacaggaccctcactctactcagtgtcacaaggaatgacacaggaccctatgagtgtgaaatacagaacccagtgagtgcgaaccgcagtgacccagtcaccttgaatgtcacctatggcccggacacccccaccatttccccttcagacacctattacccgtccaggggcaaacctcagcctctcctgctatgcagcctctaacccacctgcacagtactcctggcttatcaatggaacattccagcaaagcacacaagagctctttatccctaacatcactgtgaataatagtggatcctatacctgccacgccaataactcagtcactggctgcaacaggaccacagtcaagacgatcatagtcactgagctaagtccagtagtagcaaagccccaaatcaaagccagnaagaccacagtcacaggagataaggactctgtgaacctgacctgctcacaaatgacactggaatctccatccgttggttnttcaa

SEQ ID NO: 212 - DNA, 235 bp, Homo sapiens
ccattgtagtccccgatagcaacaaatgccttgaacctggtgcgctggccggcacgggtctgcttctgcactggcataatcttcaaaacctcatccttgagagaggcccccaggaagaaatcaatgatctctgattccttaatgggcagggagaagagatagatctcctccagggacttgattttcatgtccttgaccaagcggcccaacttggtgacgggcatccactccttat

SEQ ID NO: 213 - DNA, 240 bp, Homo sapiens
ccaacaggggacctgcatatggcctgagtcgggaggtgcagcagaagattgagaaacaatatgatgcagatctggagcagatcctgatccagtggatcaccacccagtgccgaaaggatgtgggccggccccagcctggacgcgagaacttccagaactggctcaaggatggcacggtgctatgtgagctcattaatgcactgtaccccgaggggcaggccccagtaaagaagatccagg

SEQ ID NO: 214 - DNA, 114 bp, Homo sapiens
ccacaaccggccctgagttcatgtacttcaccagcccagggaagaatggtcggtctttcaggtcaatgtagtgctgcttcaggtgttcttcagaggcccggaggaacttcatgg

SEQ ID NO: 215 - DNA, 149 bp, Homo sapiens
  misc_feature 145, 149: n = A,T,C or G
aaacagactattttagatgtttatttaatactgaaatgttgtcaactatcataaagtatttctctgcatcacaaaaattccatatattaaggatttacacaatccaggaaaaaaaatttttagaaactgtttttttttttttttncccn

SEQ ID NO: 216 - DNA, 459 bp, Homo sapiens
  misc_feature 153, 182, 189, 204, 207, 211, 214, 216, 220, 224, 225, 229,232, 235, 239, 242, 251, 254, 256, 260, 263, 265, 291, 309,322, 354, 361, 371, 386, 394, 396: n = A,T,C or G
ggtcgcggccgaggtccacagccatgccatcgtcggtgaccccgargcaactcacgcggttgtcgtggccttcccsaarggcmccasacmagttttgattagaaakgttgcaaaaaacaggatggaaaasccactactgctgytataaaggantgcggggggcggggcggggggtcccacanaacctgntttccaaacgctctnctnaacnctngncttnaaannaacnccnagnacanttnggggtgaanggnankaanccncntaaaatgtgaggggccttgaaaaatntatatgagggggggggtntttwctctctctntcccctctgccgggggggcctctaaagggganaattgtncatatatatntcactctggggggcnctagaatntntttatagggggcccaattcgccctatagtgagtcgtattacaattcactggccgtcgttttac

SEQ ID NO: 217 - DNA, 222 bp, Homo sapiens
cctcctgcactccgcccggacccccggccccgccgtggggataaacacacttgttacctatgatatggttccagagcccaaaatcattgatgctgctttgcgggcatgcagacggttaaatgattttgctagtacagttcgtatcctagaggttgttaaggacaaagcaggacctcataaggaaatctacccctatgtcatccaggaacttagaccaacttt

SEQ ID NO: 218 - DNA, 260 bp, Homo sapiens
ccactcctggaaacccactgatagatgagtttcccccattcttctggcctccgccacatgatcaggaagctggacttgctcttatccaaccactcgaggttccctttcttcctcagttcctctaatacaatctggatcgactccacaggaagctttcgctgtagcttgacgttgttgaagagcgggctctcctgagcttccatcaccgtcatgctggactgtttgtgcaggcggcagaaggacaggaccagcgagcacca

SEQ ID NO: 219 - DNA, 199 bp, Homo sapiens
  misc_feature 125, 142: n = A,T,C or G
ctgagagaccaggagaagttccagatgcagagactgtgatgctcttgactatggaattattgcggccagtagccaagttagagacaaaacaggcataggtcccgttattatttggcgtaattttngcgaaaaaaaaaacttntgtgtgttgctgcggtatcccattgatacgccaagaatactgcggggatgggttaaa

SEQ ID NO: 220 - DNA, 142 bp, Homo sapiens
tgctggtgccattgccccatgtgaagtcactgtgccagcccagaacactggtctcgggcccgagaagacctcctttttccaggctttaggtatcaccactaaaatctccaggggcaccattgaaatcctgagtgatgtgcag

SEQ ID NO: 221 - DNA, 226 bp, Homo sapiens
aaaccatgttccccctaaacatggctgttaacccactgcatgcagaaacttggatgtcactgcctgacattcacttccagagaggacctatcccaaatgtggaattgactgcctatgccaagtccctggaaaaggagcttcagtattgtggggctcataaaacatgaatcaagcaatccagcctcatgggaagtcctggcacagtttttgtaaagcccttgcacag

SEQ ID NO: 222 - DNA, 346 bp, Homo sapiens
  misc_feature 151, 172, 188, 218, 245, 248, 318: n = A,T,C or G
ctggaccgggtacttcgggaaagtgctcatggcctccaccagctacctgccttcccaagtgacagaaatgttcaaccagggcagagccttcgccacggtccgcctgccattctgcggccacaaaaacatctgctcgctagccacaattcanaagatcccgcggttgttggtngggtgccgccgacggntacctgtacatgtacaacctggacccccangagggcggcgagtgtgccctgatgaancancaccggctggacggcagtctggaaacgaccaatgagatcttggactctgcctctcacgactgccccttantcacttcagactacgggtgcagacctgc

SEQ ID NO: 223 - DNA, 146 bp, Homo sapiens
  misc_feature 128, 134, 141: n = A,T,C or G
aaagtttgtgctataaaattgtgcaaatatgttaaggattgagacccaccaatgcactactgtaatatttcgcttcctaaatttcttccacctacagataatagacaacaagtctgagaaactaaggntaaccnaacttanatata

SEQ ID NO: 224 - DNA, 103 bp, Homo sapiens
  misc_feature 7: n = A,T,C or G
aactgtnaggggcatctgcctaaaccagaatcttttgtcagaaaccttaacccaacaaaacaaatcttgagtagctcatgcccggctcttaggaattttgtct

SEQ ID NO: 225 - DNA, 463 bp, Homo sapiens
  misc_feature 115, 118, 131, 136, 144, 165, 175, 178, 187, 230, 341, 348,349, 353, 372, 374, 377, 386, 393, 394, 396, 399, 400, 402,404, 405, 411, 413, 414, 419, 420, 422, 424, 427, 433, 434,442, 444, 448, 453, 456: n = A,T,C or G
cyrwtacacmaggagamcckacccatscagacactgtgmtgcysttsaytwtggmattrttgmrgccctycgmcwacwtasacwcrwaacacgcataagtccctgctttmyttsncangattkaakctatnmacanaacttgwngtgtccgtgctatggggtccnatatayacgncangattactgngagggayacgcttagacgccagaaaggcaggacaggtttggantgaatctctaaaagggaaccatctctggggggkaaaaaatrgkggarycytscccatagagracwttcackgtgacatggatctstgcacctgcccstgcskgcgttctanaggccanntayntagattttcrtcwcaytgntngcnactttaaantgaatgnngnggnncnanncatttncnntaacnngncnggnccaatnnctaggggnanattntcaanatntcggttt

SEQ ID NO: 226 - DNA, 291 bp, Homo sapiens
  misc_feature 138: n = A,T,C or G
aaagcataataaaaaacaaattacaatacaaaagtgctctttaggaaggagacactaaacaacaggcccatattaccccttgactatttagccaagacataagctacaaattttgccggaaaaactgtccatacattnttaactacttcttcattattcttatggaccatcatccaggacatctgtttgaagaaatatccagttataatattttcaaaggttagaattgtgaagaaaaaatataaaatgtgattaaaggatatatagccttcagatgtaatttacagtttt

SEQ ID NO: 227 - DNA, 257 bp, Homo sapiens
aaactcaggctatgtatacagtaaccttgtggaactggttcagccagatcttcactttcatgaaagcacagggtctgtccttttctttccagagggctcctctcatattccatcgccagtttctgttacaaggcagactgaatcaagccaagatcaacacacactggtacacgtggctcccaaccaatttatatgtatatatatattctacttccaacacccgcattcatcctggttcaatcaaagcctggttttgg

SEQ ID NO: 228 - DNA, 329 bp, Homo sapiens
  misc_feature 112, 141, 152, 193, 221, 244, 323: n = A,T,C or G
cgaggtaaagcttttagagaatacactacaccagggagtatgactactagtatgactattaggagggtaataccaagagttggactacgcaccttaggcaagatacaaaccnactaaaatagaataaagaatgagtcagangagtggagccnttttaaccaagcaagcacatttggtaatttctacaacttantctcagcgacctgcccgggcgggcgctngaagggcgaattctgcagatatncatcacactggcgggcgctcgagcatgcatctagagggcccaattcgccctatagtgagtcgtattacaattcactggncgggcg

SEQ ID NO: 229 - DNA, 276 bp, Homo sapiens
  misc_feature 263, 268: n = A,T,C or G
cgaggtccagagggaagtggatgcgggggtagggcaccaggttggtctggaattctgtcaggtcaacattcagggctccatcaaatctcagggaagcagtgatggaggacacaatctggctaataaggcggttaaggttagtgtaggttgggcgctcgatatcgaggtttctacgacagatgtcatagatggcctcattgtctaccatgaaggcacaatcagagtgctccaaggtggtgtgggtggtgaggatggagttgtanggctnaactacag

SEQ ID NO: 230 - DNA, 191 bp, Homo sapiens
  misc_feature 8, 45, 71, 75, 83, 84, 102, 153, 158, 181: n = A,T,C or G
aaaaaccngagacaactggaaattcattggacctgatcaacatcntaatttctattattccaagttcttcnattngatttggnnaatggaacaaattgatgntaccttgaagtggtatgaggacctgataccttcagcctactttccccactnccaancaatgatacatcttctccaagcnttggatgtgg

SEQ ID NO: 231 - DNA, 189 bp, Homo sapiens
  misc_feature 40, 65, 90, 95, 97, 112, 156, 160, 185, 188: n = A,T,C or G
tcttagcaagctcttcccccaggttaggggaaacactggngatgggagtagctcttcttgctttnagctgaatgacaaccatcttgccancaggnanctgaagctggcagangagcccaccggcgccttttcagtggttcttgggatgctccgcanccanttaagccgactgagttccttttctnatng

SEQ ID NO: 232 - DNA, 455 bp, Homo sapiens
ctacactggaagccaacttgccggcacccccgctccccaacccttcttgcctgggtaggagaggctaaagatcaccctaaatttactcatctctctagtgctgcctcacattgggcctcagcagctccccagcaccaattcacaggtcacccctctcttcttgcactgtccccaaacttgctgtcaattccgagatctaatctccccctacgctctgccaggaattctttcagacctcactagcacaagcccggttgctccttgtcaggagaatttgtagatcattctcacttcaaattcctggggctgatacttctctcatcttgcaccccaacctctgtaaatagatttaccgcatttacggctgcattctgtaagtgggcatggtctcctaatggaggagtgttcattgtataataagttattcacctgagtatgcaataaagatgtggtgg

SEQ ID NO: 233 - DNA, 149 bp, Homo sapiens
  misc_feature 145, 148, 149: n = A,T,C or G
ttcgcccttattccgatagtgtaagggcgaattctgcagatatccatcacactggcggccgctcgagcatgcatctagagggcccaattcgccctatagtgagtcgtattacaattcactggccgtcgttttacaacgtcgtganaann

SEQ ID NO: 234 - DNA, 476 bp, Homo sapiens
ctgcagcctgggactgaccgggaggctctgattatttacccaccacaggtaggttgtgttctgaatctcaggttcacaggttaaggctacagcatcctcatcctccacggggttggagttgttgctggtgatgaagggtttgggtggctctgcatagactgtgatcgtcgtgactgtggtcctattgaggccagtgtctgagttatgggcttggcacgtataggatccactattattcacagtgatgttggggataaagagctcttgggtggattgctggaaagtcccattgacaaaccaagagtactgtgcaggtgggttagaggctgcgtggcaggagaggttcagattttcccctgatctgtaagatgtgtttagaggggaaatggtgggggcatccgggccatagaggacattcaggatgactgaatcactgcgcctggcactcactgggttctgggtttcacatttgtagc

SEQ ID NO: 235 - DNA, 563 bp, Homo sapiens
  misc_feature 28, 109, 266, 332, 368, 506, 512, 531: n = A,T,C or G
cgaggtaaaatgttttatttcatagctnataaaaaagtatgtatgtacaagactcaagtaaatagaaaggcagctttcaatcacaaatcagtttttcagattttactgnggaagcatatttaatgcacacatttgaatgttacacataaataattttaacgatggagtccaagttctggattttacattagatctgcatatataagacacttgtggtcaaatttcaagattggtaaagccagtttcaagctgcttatattttgagnacaggtttcactattacaaatatatgatgttaaactaacaaactcatgaccttcaaagatgtcttngtcccacgcacacacatttgtaatttgtgtccattngctatttcccttcttctataatcttcaaattatatagttatgcattgagttccctatgcatctcacccatctcctttatctcagccttctcatacttggccattctcttctttctggaaataaccagcacaacaattncagcancaactgctatcaccacaancccaataaccagcaataacacccggcttttag

SEQ ID NO: 236 - DNA, 578 bp, Homo sapiens
ctggaagccagttcccagaagaccaaactgcatgccccaatcgccaaggtaatttattcttattacttgatgtcctaaagcttctttgagatttgctataaaatttcctatgatggtagaacgcaaatgtccaacatgaaattttttggcaacattaggtgaactgaattcaaccacaatcttcttctggggaagtccagagaaaagttcactttttaatccatattttgagccatcttcaattacttgttgtagcactgtctttgttaagagctctctgtttattttgaaatttacagtcctttgaccagtactgatttcactcaccactgtatcacatcttagcttctctgctagtctcttggcttgaacttgaatatctggtcttgaatggtcattgtctttttccaataaagaatccacagaaagctgaaaatcagctacttcttctttttgggaaattggaactgcagatattgatgtgatcaagttttctggtggaagattcaacactctggaaagctggcaagcaatagcgcggcgaaagccgcacgccatgtccacctctacggaagaac

SEQ ID NO: 237 - DNA, 526 bp, Homo sapiens
  misc_feature 78, 483, 525: n = A,T,C or G
ccaccaaacaattcgagcagctccaggcagccatacatacagaccttggggccttagaaaaatcagtcagtgccctanaaaagtctctgacctcgttgtctgaggtggtcctacagaaccggagaggattagatctgctgttcctaaaagaaggaggattatgtgctgccctaaaagaagaatgctgtttctatgcagaccacactggcgtagtaagggatagcatggctaagctaagagaaaggctaaaccagaggcaaaaattgttcgaatcaggacaagggtggtttgagggactgtttaacaggtccccatggttcacgaccctgatatccaccattatgggccctctgatagtacttttattaatcctactcctcggaccctgcattctcaaccgcttggtccagtttgtaaaagacagaatttctgtggtgcaggccctggttctgacccaacagtatcaccaactcaaatcaatanatccagaagaagtagaatcgccgtgaataaaagattttattna

SEQ ID NO: 238 - DNA, 478 bp, Homo sapiens
  misc_feature 1, 254, 413, 447, 463, 472, 475, 477: n = A,T,C or G
ncgaggtgcatatttaatgcacacatttgaatgttacacataaataattttaacgatggagtccaagttctggattttacattagatctgcatatataagacacttgtggtcaaatttcaagattggtaaagccagtttcaagctgcttatattttgagtacaggtttcactattacaaatgtatgatgttaaactaacaaactcatgaccttcaaagatgtcttcgtcccacgcacacacatttgtaatttgngtccatttgctatttcccttcttctataatcttcaaattatatagttatgcattgagtgccctatgcatctcacccatctcctttatctcagccttctcatactttgccattctcttctttctggaaataaccagcacaacaattccagcaacaactgntatcaccacaaccacaataacagcaataacaccngcttttagaccctgcnttgagaatncangng

SEQ ID NO: 239 - DNA, 545 bp, Homo sapiens
ttgaatgaattaatgatggcttctgagtcaactttactggctcaggaaccacgagagatgactgcagatgtaatcgagcttaaagggaaattcctcatcaacttagaaggtggtgatattcgtgaagagtcttcctataaagtaattgtcatgccgactacgaaagaaaaatgcccccgttgttggaagtatacagcggagtcttcagatacactgtgtcctcgatgtgcagaagttgtcagtggaaaatagtattaacagctcactcgagcaagaaccctcctgacagtactggctagaagtttggatggattatttacaatataggaaagaaagccaagatttaggtaatgagtggatgagtaaatggtggaggatgggagtcaaaatcagaattatagaagaagtatttcctgtaactatagaaagaattatgtatatatacatgcagaaatatatatgtgtgtgtgtatctgtggatggatatatgtatatctcttcctatatatatccatagtgggacttattcagaacatagatatgta

SEQ ID NO: 240 - DNA, 339 bp, Homo sapiens
  misc_feature 132, 141, 145, 148, 161, 170, 171, 182, 183, 184, 189, 190,197, 201, 211, 213, 229, 230, 234, 237, 273, 287, 293, 294,310, 317, 324: n = A,T,C or G
ccatggaaccaatgtgacttattctttttcatttttttccctaaaaatccaagggggataaaggactgkgkgggraaagtcccaawtaawkaaggwaaaargrargggcmtwccaaraaggsacywcccccncttcttggncttnaanaaactcttgaggngaccccatnngccaaatccannnaggannaggatancagnttgaccatgngnaccccataagaccctnngggnggngctctcgctcgasaggggaaagctctttwcamgacncctggggaaacccngccccnntstaaatgtgcccacncctcccnggggggnctctaaagggggaaa

SEQ ID NO: 241 - DNA, 577 bp, Homo sapiens
  misc_feature 91, 92, 106, 129, 131, 134, 135, 136, 137, 138, 142, 147,157, 167, 168, 175, 176, 177, 178, 184, 187, 197, 243, 251,261, 264, 272, 274, 297, 299, 301, 303, 306, 307, 308, 309,311, 312, 316, 319, 321, 333, 335, 336, 359, 364, 369: n = A,T,C or G
  misc_feature 370, 371, 375, 382, 395, 400, 401, 407, 411, 418, 419, 422,423, 429, 435, 437, 442, 443, 447, 453, 454, 456, 469, 472,475, 479, 488, 494, 500, 502, 504, 505, 512, 518, 523, 530,548, 550, 553, 554, 559, 562, 570, 576: n = A,T,C or G
ttttttttttttttbsgggraamccytwwttwtttwaaaaaaaaaaaaaccccckgrgggggrvccyttcccmaaccccccmmmyttaaannwtttttwtttkaanaaaagggraaaaaaaaaaattbngnggnnnnntttnaaaangccccccccnaaacccaaannaaaaaannnntttttnaangggttttttngggaagggttttaaaaacccyttaaaaaaaaskkttttaaaaaaanacbggrantttttttttnaansskyaaangnaaaaaaaayccccaaaaaycccngntngnccnnnnanntaanccntncccccaaaaaangnncmaaaawtcccaaaaaaaaaaanccccnttttnnngggnaaaaaangggccaaaaaaanccccnngggggncccnttggggnnccnntttttngggggncnttttnnaaanggggcnncncggggggaaaaanccntangggnaaaattcgngaaatncccaancncnnggggggnggtganaattngttttanaagggcccattccccccnanagnnggggntanaaaaaaangggggng

SEQ ID NO: 242 - DNA, 534 bp, Homo sapiens
  misc_feature 533: n = A,T,C or G
ctgccccccacccttcccttcgatgacaacgtttgcaggcttcagggggaccagggaacaaagctggggcctggcagccccactacgctgccagccggggagaacaagtcacaattacaaattatcacaacaattagcgcctgtacttgggggatctgcaaattgaggaggccccagctcctcattgtacacgggtctatttggcagtgaccttgctctggagacgatgatattccttcagcctgagggaattgatgttgatgaacccggtggcatcagttggctcataatcaccctgcacgttcatgctcaccagctcctcattgtagagagacagtggggactcccggccgaggatgtacacctggcccttgaggacggacacctgcactttcccttccactcgctcctgggacttggcgatgcagtggcggacaaattcacactcagggctgtgccagaaacccggtattacaccagcttcagcaaatttcaagcccaggacctgcccgggcggcgctaagggcgaattnt

SEQ ID NO: 243 - DNA, 119 bp, Homo sapiens
  misc_feature 21, 31, 56, 63, 65, 82, 92, 100, 119: n = A,T,C or G
atgatctgcctgcctggggancccaatacangcatgaaccactgcacccacctacntagatantncatgtgctatagacatnagagagattntccatttntccatgacatttttcctcn

SEQ ID NO: 244 - DNA, 529 bp, Homo sapiens
  misc_feature 509: n = A,T,C or G
ctgcagcctgggactgaccgggaggctctgattatttacccaccacaggtaggttgtgttctgaatctcaggttcacaggttaaggctacagcatcctcatcctccacggggttggagttgttgctggtgatgaagggtttgggtggctctgcatagactgtgatcgtcgtgactgtggtcctattgaggccagtgtctgagttatgggcttggcacgtataggatccactattattcacagtgatgttggggataaagagctcttgggtggattgctggaaagtcccattgacaaaccaagagtactgtgcaggtgggttagaggctgcgtggcaggagaggttcagattttcccctgatctgtaagatgtgtttagaggggaaatggtgggggcatccgggccatagaggacattcaggatgactgaatcactgcgcctggcactcactgggttctgggtttcacatttgtagcttgctgtgtcatttcttgtgacattgaatagantgagggtcctgtgccattgg

SEQ ID NO: 245 - DNA, 500 bp, Homo sapiens
ctgccccccacccttcccttcgatgacaacgtttgcaggcttcagggggaccagggaacaaagctggggcctggcagccccactacgctgccagccggggagaacaagtcacaattacaaattatcacaacaattagcgcctgtacttgggggatctgcaaattgaggaggccccagctcctcattgtacacgggtctatttggcagtgaccttgctctggagacgatgatattccttcagcctgagggaattgatgttgatgaacccggtggcatcagttggctcataatcaccctgcacgttcatgctcaccagctcctcattgtagagagacagtggggactcccggccgaggatgtacacctggcccttgaggacggacacctgcactttcccttccactcgctcctgggacttggcgatgcagtggcggacaaattcacactcagggctgtgccagaaaccggtatacaccagctcagcaaatttcaagcccagg

SEQ ID NO: 246 - DNA, 448 bp, Homo sapiens
  misc_feature 12, 411: n = A,T,C or G
gtggccctgcanaatgagggttgggctgatagaatgtcaattaggggaggcaggatacagggtgagggaacagggtctagcttgtatatttgcctgcaggaaggagggagggcaggagagactctgcatagaaggactggaactacacatttaagttttcaaccccaatatgcaggggggaaacagccaagccactctccatctgtctagtattaggaacctctcttcaagtggtcttttgtcatctctgttcttcttcccaattctgtattccagattccaaattctacaattgaaacccaagttctgaattctaagttctaccttccgagttcctgttacgtgtctgtctcctgcccctaaatctttcctggctcccatccctttccccagcccctctgggcagaatgnctgaacctcctcctgaccgtggtgacgaggtttagtt

SEQ ID NO: 247 - DNA, 449 bp, Homo sapiens
  misc_feature 19, 29, 148, 334, 362, 370, 386, 410, 414, 423, 441: n = A,T,C or G
cctgggcttgaaatttgcngagctggtgnataccggtttctggcacagccctgagtgtgaatttgtccgccactgcatcgccaagtcccaggagcgagtggaagggaaagtgcaggtgtccgtcctcaagggccaggtgtacatcctnggccgggagtccccactgtctctctacaatgaggagctggtgagcatgaacgtgcagggtgattatgagccaactgatgccaccgggttcatcaacatcaattccctcaggcctgaaggaatatcatcgtctccagagcaaggtcactgccaaatagacccgtgtacaatgaggagctggggcctnctcaatcttgcagatcccccaagtacangcgctaantgttgtgataatttantaattgtgacttgttctccccggntggnagcgggagnggggctgccatgccccanctttgttc

SEQ ID NO: 248 - DNA, 436 bp, Homo sapiens
  misc_feature 24, 53, 55, 241: n = A,T,C or G
ggatccctagtaacggccgccagngtgctggaattcgcccttagcggccgccntngcaggtccacccgctctgctggcctggatctccccactctaggggtcaggctccattaggatttgccccttcccatctcttcctacccaaccactcaaattaatctttctttacctgagaccagttgggagcactggagtgcagggaggagaggggaagggccagtctgggcttgccgggttctantctcctttgcactgagggccacactattaccatgagaagagggcctgtgggagcctgcaaactcactgctcaagaagacatggagactcctgccctgttgtgtatagatgcaagatatttatatatatttttgggtggcaatattaaatacagacactaagttatagtatatctggacaagccaacttgtaaata

SEQ ID NO: 249 - DNA, 415 bp, Homo sapiens
  misc_feature 113, 116: n = A,T,C or G
gcaggtaaacaaatttttattacacaaaggttgtcacataattggatacttctctactttgtacacaattattctcactctccacagaaaggctgcttaacttctcatctggnggnggcaagcactaaaatcctgattttaacagaatagtagtaaaaatgcctcagtgatttaagttgaaagcagtacactggtacatggctcttgtacccagtatcaggaatgtacaaatgttttttattcaaaaatacaaaataaattatctgtaggcatggacaatgacagcagtaaaccattatatattttgtcaactgaaaccagtaactgatggttatagtgattttcagccagcctttttcttcattttctccaactgacttctctgaagttattggtgaggaacactgccttgggc

SEQ ID NO: 250 - DNA, 529 bp, Homo sapiens
  misc_feature 1, 454, 477: n = A,T,C or G
nggtccacgcttcacggtcacgctcgtccgtcctgcaatggcgtgtttacatggtcacacgtgtgtgtatcaccagtgggtcaactgcttgtcattcctcccgtggcagtttgtgtagacaatcttactgagcaaaaggcaatgaaaagtcttggttcccacactgcaatatattggaattttcacctcagtttatgaagtttatttcgaaatccatagtcatctaagaatgaatacctgtctgccatgtatttcaatcttagtgagccaaaattgtttgtttgttactacagaatagagatgactgttttttgccacagccctatggaatttgcaatctgtgattgccttgtaaaaaggagagtgcatatggcactgcattaaacgtgtggtgtttctagtcaatgatattggtgagcacaatgtattcatttaatggcatagaccataccanacctaatttgcaagtattgggtnttaaacttcaagtgcaatgtatatgaaaaccaatctgaccttggatctctta

SEQ ID NO: 251 - DNA, 535 bp, Homo sapiens
  misc_feature 530, 533: n = A,T,C or G
aaatttgtgattttcacatttttcgtcttttggacttctggtgtctcaatgcttcaatgtcccagtgcaaaaagtaaagaaatatagtctcaataacttagtaggacttcagtaagtcacttaaatgacaagacaggattctgaaaactccccgtttaactgattatggaatagttctttctcctgcttctccgtttatctaccaagagcgcagacttgcatcctgtcactaccactcgttagagaaagagaagaagagaaagaggaagagtgggtgggctggaagaatgtcctagaatgtgttattgcccctgttcatgaggtacgcaatgaaaattaaattgcaccccaaatatggctggaatgccacttcccttttcttctcaagccccgggctagcttttgaaatggcataaagactgaggtgaccttcaggaagcactgcagatattaattttccatagatctggatctggccctgctgcttctcagacagcattggatttcctaaaggtgctcaggaggatggntgngt

SEQ ID NO: 252 - DNA, 522 bp, Homo sapiens
ccaggggtctctacaaatttcttagcagattcaatgctatcaaacacaacaaaaattgatcccttaaatgctttatgcaatgttcttctcatctgaatatttagtacttgacctttatcttctaaccattcttttatgtcatcaagagttgcatcagttgggaagcctttaatataaacagatctgttttttacatcatttttatactcatcagtcacttcaggtaggggtttgcttggagaccttctgattttagttttatcttcactgatttccatgagttctgccttggatttgctcaatgcttccacaattacattaaagtctgttgttagacggttcaacctgttgaattttatcattatctccaaaggtacccagccttcatccagttttatctgttcctttagaaacttgtcccgtggcaaattgaagtcgccaaaataatactcaatttgatgacagattttggcctccagggcagccatcttttcattatcaccattttcagccattgcggct

SEQ ID NO: 253 - DNA, 316 bp, Homo sapiens
cctgaactagtctcaaagtctcatccacagagcggccaacagggaggtcatttacagtgatctgccgaagaatacccttatcatcaatgataaaaaggcccctgaacgagatgccttcatcagcctttaagaccccataatcctgagcaatggtgcgcttcgggtctgataccaaaggaatgttcatgggtcccagtcctccttgtttcttaggtgtattgacccatgctagatgacagaagtgagaatccacagaagcaccaatcacttggcagttgagtttcttaaattcttctgccctatcactgaaagcaat

SEQ ID NO: 254 - DNA, 404 bp, Homo sapiens
  misc_feature 360: n = A,T,C or G
aaaaaaaaaccaaatttgttactttagaaaaatgaatgcagtgcattttcagcaatattatcgccacagactctgattgctcagtccacacacaagtaggagttgccttctatggtgacatggcttctctgcactaattcccatcaggccgaaaaatattagggcaggttaagtaaagaccgaattgttgcacaaaggaacatttactcatcagatcccactgatctcttctgtgcccgtttcctgggcaaccttcttggtgaagctttattgatttgattcaatgtttcctgaggaatccaactcatgtcaacatcattctgacttgatgtacccatttctactttctgtatgggtctnttacgctttctagattctaggagttgatgaaggccaacaataac

SEQ ID NO: 255 - DNA, 257 bp, Homo sapiens
ctgtggactggtcggggccctgcaaggtgccctgctgtgcagcagcgccatcctgaagcggaacttgtactcagaccttaagaatcttgattctaggatccgggcacagaagaaaaagaattagttccatcagggaggagtcagaggaatttgcccaatggctggggcatctcccttgacttacccataatgtctttctgcattagttccttgcacgtataaagcactctaatttggttctgatgcctgaagagagg

SEQ ID NO: 256 - DNA, 579 bp, Homo sapiens
  misc_feature 1, 559: n = A,T,C or G
ncaggtctgaagcaacttgggattaattgcttgattagcttcacgaagcacagagataaggtcgctcacttgctttatgttattaggtgtaaagaaagtgtatgctgtgcctgttttggtactgcgagcagttcttccaattcgatgaatataatcctctgaggagttagggtagtcataattgatgacaaatttcacatcttccacatctagccctctggaggccacatctgtagcaatcagaataggagcttttccatgtttgaattcatttagaacccagtcacgctcttgttgactcttgtcaccatggatacccatggcaggccacccatctctcctcatttttctggtaagcccatcacatcttcttttggtttccacaaaaacaatggttttattctccttctcactcatgatctcttccattagacgaataagtttttcatccttttctacgtcatgacacacatccacaatctgaagaatgttgtggtttgcactcagttcaagtgcaccaatgtttatatgaatatagtctttcaggaaatcttcagcnagctgtcttacttcttttgg

SEQ ID NO: 257 - DNA, 345 bp, Homo sapiens
ctggagcacaacgtttggtgaatatgctgtttcctcagttcagagaggtagcaactaggtaaactccttataaaaagcaaatacctggatttacaaaagtgaaagtagttgttcacaaaagaattcgccatggaattctttcagttaccaagctctcctggtaatgtttgtggttatatcatttacacaaaacttttcaggaacttctgtgttgtttaagcaagatgtatctgtactgatgtctcagtgaatcagtctgtttattaagcacttatcagggcttccacacacttatttattttgccctagttaatcctgttgtttgctgccattggcatgaaatgg

SEQ ID NO: 258 - DNA, 340 bp, Homo sapiens
aaataagaggggggtgggaatgaatgtcgagatacgagcacctgcatcttttagtcaattgtcagtggagtcagtggggtgctaagtgttctgaactgaagtaggtgcactaaggttccaagctccctgcaaggattccttggaagagttggacttagggtaagagcggggtgcacggtacccagccttgctctcattcccaggacaggaacaggagagcagtgcacctcccaggatgactagggcagaccctgcccagccaataaagatggcagggccaaactcatacttaatgttggtagggatcaaagggttataaaagtctgtgacaatctgatgg

SEQ ID NO: 259 - DNA, 638 bp, Homo sapiens
gtgcaactttaatgattgtacttgatattaagtgttctcaactgagtaacttttaagtggaaaccaagtttagatttggggagtggtaaaggaatcagctttttctattgttaggggaagacagtaatttatcattcatgggccagtagattgttgaaagttggtgaatcggattataagcttctagctaacacaaggattcagaattaggtaaacatctgaaggtttagtatattagaaacacccaaaccagtaatatgctaacctgatgcactgctgaaagaaaatgtgaatttttcgtaataattgcattttagtgaattgtacagtgggtggaaagggcatttggagctcattagaatgagacatagtacaccccaatggccctgtttattaaatgtagtggattaagtgtctgtcaacaaatacaccaaaaccattttttatagaaacagtatttaatggtcactcaatagctttcaaaatacatttttgtattacagcactgcacaagctattctaatagtgctcccgcctcatcattcctgcaaagcttgctttggggagttggataatgtgaaaattttaaagtacctaggggagaaagagccatgtaaatatctgtataaacttggagc

SEQ ID NO: 260 - DNA, 203 bp, Homo sapiens
  misc_feature 1, 29, 30, 95, 112, 143, 152, 168, 169, 189: n = A,T,C or G
ngtaaataaggcttggggtttttcccggnnttttggggaacttgaaactgaggtgggactttccagaaactgttgctagtttcgctttatctgantaccatctgttcttggncctgagccggggcccaggtgctcgaccacanatatcctgnttggcccctgtcccanntttgttcaaccttattcttnaactaaacttcctt

SEQ ID NO: 261 - DNA, 235 bp, Homo sapiens
cctccttggctcagtccaggtgtctgcaggaggaaggtgttgtctgcatttagtgtctgagactgggtttgaggaggcaccagataaaaggagatacacttgcagctataaagtcagcttcaaaccccagggcttgtaattccaagaggagggtggggaggcgaggccatagtctccgagtcccaggacgatggctgacaatacaccaaaacatcagcttctctccacagcacag

SEQ ID NO: 262 - DNA, 595 bp, Homo sapiens
aaatcatttgaagaaaaggtcgaaaacttaaagtctaaagtagggggaaccaagcctgctggtggtgattttggagaagtcttgaattcggccgcaaatgctagtgccgccaccacggagcctcttccagaaaagacacaggagagcctgtgagattcctacctttgttctgctacccactgccagatgctgcaagcgaggtccaagcacatcttgtcaacatgcattgccatgaatttctaccagatgtgcttttatttagctttacatattcctttgaccaaatagtttgtgggttaaacaaaatgaaaatatcttcacctctattcttgggaaacaccctttagtgtacatttatgttcctttatttaggaaacaccattataaaaacacttatagtaaatggggacattcactataatgatctaagaagctacagattgtcatagttgttttcctgctttacaaaattgctccagatctggaatgccagtttgacctttgtcttctataatatttcctttttttcccctctttgaatctctgtatatttgattcttaactaaaattgttctcttaaatattctgaatcctg

SEQ ID NO: 263 - DNA, 518 bp, Homo sapiens
  misc_feature 23, 46, 48, 60, 64, 83, 482: n = A,T,C or G
gttttcaagattcagatacagangaagcttcaattcaacctttcananaagacattccanctcncatgatctcatcaaccaanagaatgttggtggcaatcacggtgcaggagtgaagaagctgtttctttacacaatagttatcccatacgcctacttctgctgccaccattggctcacctgtgttcaggtccacacccacaagctgacctgattctgaatgttctgcttgaattttaactaatgtttcctgaaggtcaaaaccagagttctgagcaagaaccttgggaataatgagcaatgcatcagcaaatgcttggactccaagctgtgccctgccctttacactgggcttatgtttaatcagggcttctgccattgccacttccacggcaccagcacctggaaccacacagccatcatcaatagcatttttgacagccctcaagccgtccctcactgcatctttgatctgagtgagngtgtgcttatttggtccttttgatcaataatgtgac

SEQ ID NO: 264 - DNA, 182 bp, Homo sapiens
  misc_feature 39, 109: n = A,T,C or G
ttcgcccttattccgatagtgtaagggcgaattctgcanatatccatcacactggcaggctcgctcgagcatgcatctagagggcccaattcgccctatagtgagtcgnattacaattcactggccgtcgttttacaacgtcgtgagaaaccataaaggttttcaggctaaacaaagaacaa

SEQ ID NO: 265 - DNA, 361 bp, Homo sapiens
aaattaaaaacgattttgaaaaattacatctatatttaatccctaagaagtgttttaagctggtaatgcagctcgctgtagctctaagagaggggttagtcaggaatctgatcttgagccataaaggttttcaggctaaacaaagaacaaatttaagtgacggaaaatatttataattccaatataactcagttatattgttataaaaatacccatgctagcatgcaactgcctatatatgtgtgcatatatatatatgtctgtgtgtgtgtattgatccattcaatgtcaatattttggaacccagacaattttctcattttctagtgaatgggaggcacataatcccaccacaaaaaaa

SEQ ID NO: 266 - DNA, 610 bp, Homo sapiens
ttggacgagttggtggtaggatgcagtccagagcctcaagcagcgtggttccactggcattgccatccttacgggtgactttccatcccttgaaccaaggcatgttagcacttggctccagcatgttgtcaccattccaaccagaaattggcacaaatgctactgtgtcggggttgtagccaattttcttaatgtaagtgctgacttccttaacaatttcctcatatctcttctggctgtagggtggctcagtggaatccattttgttaacaccgacaattagttgtttcacacccagtgtgtaagccagaagggcatgctctcgggtctgcccattcttggagataccagcttcaaattcaccaacaccagcagcaacaatcaggacagcacagtcagcctgagatgtccctgtaatcatgtttttgataaagtctctgtgtcctggggcatcaatgatagtcacatagtacttgctggtctcaaatttccacaaggagatatcaatggtgataccacgttcacgctcagctttcagtttatccaagacccaggcatacttgaaggagccctttcccatctcaacagcctccttctcaaatttttcaat

SEQ ID NO: 267 - DNA, 537 bp, Homo sapiens
cctacctcattggcatattaagaaagttttctcaagtatatttagtgtttatcattttactatagttcttcaaatgtctgacattcatcttttccctacctctaaattcctttctttttcacattatctttcttgattgctttttaatagaaaaacaaacaaagacatggatttactgtgcatattagcagatccatactggaaaatgcatggaggtttcatatacaccacttacagtaagtaataactcagagtataaagtcgaaaagaaagaatctgaaatattagacttgttctgaaataagcttacctaggatgataccactttcgcttaatcagaatttcccctttccaactatttaacagtggcaaatataaaaaatctggtagttaaaatacacagcagtcacttcatattactgcctccctcaacccactcaccttctgaagaacagggctttttcaagttttgttcccctttaagttttaatagaaaaaaaagttttaagtcatgttgtaccaatatatccccagaaa

SEQ ID NO: 268 - DNA, 484 bp, Homo sapiens
ctggcgtggctgtgggctctgctgtggggcacacattgggtcacgccattactgggggcttcagtggaggaagtaatgctgagcctgcgaggaaacagtgcttggcgcttctggcgctcctcaaaccttcggagtttcattgcttcttgcagtttagcttttaacacctgaagcttttcacctggttttgtgtggcttgctccatccaacttcttaggtgctaaagtcacaggtaccacatctgcttttagctcttcctttccatcagtgcccatgtctttcactatgacgttcacattcactgtctgacccgccctgggtttggctgctggattagcatgcttccagaaacgctgcttcaaggcttccagttctctgttggtttcaggttcaagtatcacaaaggaatcttcatcagcacctagccgtggtttaatggaaacatctactcccagttgcttaagtctatccagagtaaaccgtc

SEQ ID NO: 269 - DNA, 554 bp, Homo sapiens
ctgcttccattggtgggtcatttttgctgtcaccagcaacgttgccacgacgaacatccttgacagacacattcttgacattgaagcccacattgtccccaggaagagcttcactcaaagcttcatggtgcatttcgacagattttacttccgttgtaacgttgactggagcaaaggtgaccaccataccgggtttgagaacaccagtctccactcggccaacaggaacagtaccaataccaccaattttgtagacatcctggagaggcaggcgcaagggcttgtcagttggacgagttggtggtaggatgcagtccagagcctcaagcagcgtggttccactggcattgccatccttacgggtgactttccatcccttgaaccaaggcatgttagcacttggctccagcatgttgtcaccattccaaccagaaattggcacaaatgctactgtgtcggggttgtagccaattttcttaatgtaagtgctgacttccttaacaatttcctcatatctcttctggctgtaggggggctcagtgggaatccatttt

SEQ ID NO: 270 - DNA, 509 bp, Homo sapiens
ctgccccccacccttcccttcgatgacaacgtttgcaggcttcagggggaccagggaacaaagctggggcctggcagccccactacgctgccagccggggagaacaagtcacaattacaaattatcacaacaattagcgcctgtacttgggggatctgcaaattgaggaggccccagctcctcattgtacacgggtctatttggcagtgaccttgctctggagacgatgatattccttcagcctgagggaattgatgttgatgaacccggtggcatcagttggctcataatcaccctgcacgttcatgctcaccagctcctcattgtagagagacagtggggactcccggccgaggatgtacacctggcccttgaggacggacacctgcactttcccttccactcgctcctgggacttggcgatgcagtggcggacaaattcacactcagggctgtgccagaaaccggtatacaccagctcagcaaatttcaagcccaggccttgtttg

SEQ ID NO: 271 - DNA, 569 bp, Homo sapiens
  misc_feature 1: n = A,T,C or G
naggtttgaagatggtcccttacagcttcccaagttaggttagtgatgtgaaatgctcctgtccctggccctacctccttccctgtccccacccctgcataaggcagttgttggttttcttccccaattcttttccaagtaggttttgtttaccctactccccaaatccctgagccagaagtggggtgcttatactcccaaaccttgagtgtccagccttcccctgttgtttttagtctcttgtgctgtgcctagtggcacctgggctggggaggacactgccccgtctaggtttttataaatgtcttactcaagttcaaacctccagcctgtgaatcaactgtgtctcttttttgacttggtaagcaagtattaggctttggggtggggggaggtctgtaatgtgaaacaacttcttgtctttttttctcccactgttgtaaataacttttaatggacctgcccgggcggccaagggcgaattctgcagatatccatcacactggcggccgctcgagcatgcatctagagggcccaattcgccctatagtgagtcgtattacaattca

SEQ ID NO: 272 - DNA, 450 bp, Homo sapiens
  misc_feature 189, 212, 214, 232, 279, 285, 307, 318, 324, 349, 351, 368,415: n = A,T,C or G
aaacaaagcattagtgttatctatttggctattagtattagcaatttatctacaatatttaacaaggtaaattgtaggcaaaaatttagtacagtttcaatagaaacaccccttttttttttcctgaaaatacagcagtatttgaaggactaatttttctctgcatcagttataaggaagcttcccatntatgaacaggaacaaaaaaagtntntacaaaccttgtaaacanatctgtatcatttataaacataaataatccaaattattaacagccancagcanaaattaaactatcaattcaacnatccagggctntttgtnttgcccagttttactcctccctctntntcccatccaggactganataaactaaagctctgctaatacactgttcaggaccatgcttgggtnctactgatgatccacaggtcacttacgctgagtaa

SEQ ID NO: 273 - DNA, 630 bp, Homo sapiens
  misc_feature 572: n = A,T,C or G
ctgttacaaaatgaagacagacaacacaacatttactctgtggagatatcctactcatactatgcacgtgctgtgattttgaacataactcgtcccaaaaacttgtcacgatcatcctgactttttaggttggctgatccatcaatcttgcactcaactgttacttctttcccagtgttgttaggagcaaagctgacctgaacagcaaccaatggctgtagatacccaacatgcagttttttcccataatatgggaaatattttaagtctatcattccattatgaggataaactgctacatttggtatatcttcattctttgaaacacaatctatccttggcactccttcaggctttaatccaattattctgttcattttcacaagaatacaagggtttccttgagaatagccaaaatcaggatcattcataccactgcatgcttgaagtaatgaaataggaaactgacatgcaacataaactggacccttctgttcaaaaagtgctccatcaggacagactgtgaggttcttctgttcttctaaagtatatggttttagaaacttcttaangtcttcaatgtaccctgcatacgaagttggatcagacctactgaatgtatattccaat

SEQ ID NO: 274 - DNA, 597 bp, Homo sapiens
  misc_feature 514: n = A,T,C or G
aaataaggcttggggtttttcccggtcttttggggaacttgaaactgaggtgggactttccagaaactgttgctagtttcgctttatctgagtaccatctgttcttggccctgagccggggcccaggtgctcgaccacagatatcctgtttggcccctgtcccagttttgttcagccttattctttaactaaacttccttgtgacttttgagaactcagctctggtactttttcatgccttgcaaaatggcgttactgcagctagcttgctaagccttatggtggggtctttcattcccccctctttctggaaactgaataaaatcttttattcacgcgattctacttcttctggatctattgatttgagttggtgatactgttgggtcagaaccagggcctgcaccaccgaaattctgtcttttacaaactggaccaagcggttgagaatgcagggtccgaggagtaggattaataaaagtactatcagagggcccataatggtggatatcanggtcgtgaaccatggggacctgttaaacagtccctcaaaccacccttgtcctgattcgaacaatttttgcctctggtttagcc

SEQ ID NO: 275 - DNA, 515 bp, Homo sapiens
aaaagcagtggcccctccctgcttttattcatttcccccatcctggtttaagtataaagcactgtgaatgaaggtagttgtcaggttagctgcaggggtgtgggtgtttttattttattttattttattttatttttgaggggggaggtagtttaattttatgggctcctttccccctttttggtgatctaattgcattggttaaaagcagctaaccaggtctttagaatatgctctagccaagtctaactttatttagacgctgtagatggacaagcttgattgttgggaccaaaatgggaacattaaacaaacatcacagccctcactaataacattgctgtcaagtgtagattccccccttcaaaaaaagcttgtgaccattttgtatggcttgtctggaaacttctgtaaatcttatgttttagtaaaatattttttgttattctactttgcctttgtacagtttattttactgtgtttatttcattttcccaatttgacaatcgtatttt

SEQ ID NO: 276 - DNA, 429 bp, Homo sapiens
aaacaagactccagtatgtgaaggttaattgctgtgctccacagatcttgtctattggcccctgtagaaagttaacctttgttgttttccttttataatttgcttattgcacaattgctttagggtaagtgaattatattaagatgccctgaaattatagcactccttgattaagaagctaaaatgtttctctcatttactccttaaacaaaagacttaaattagtttgggtcattattacttttattttgcagcatttggtttgttattagcgtaagagcaagtataggatatggagaggcccctggcttcatgagaacaaaggcaggcccaggttataattacagctttctcctgccccttctttactttctctaccacagttttctccactgtttgttttcctcttgccacaatttgctaacattt

SEQ ID NO: 277 - DNA, 546 bp, Homo sapiens
  misc_feature 543: n = A,T,C or G
cctgcaggtacaaattgaccaggctgttgacggctgcctccacgtcggtggaataattctgacgaatctgggagctcatggttggttggcaagaaggagctaaccacaaaaacggtgctgacaggtcccagaagcaggagatggccgagaagatggtcccggaggttgcaagcggagaggaaatcggagggcggtcggaggctggaagagagtccccggatctgttccgtccaaacactgttgaagcaagagacagacccgcgggacctgagagaccaggagaagttccagatgcagagactgtgatgctcttgactatggaattattgcggccagtagccaagttagagacaaaacaggcataggtcccgttattatttggcgtgattttggcgataaagagaacttgtgtgtgttgctgcggtatcccattgatacgccaagaatactgcggggatgggttagaggccgagtggcaggagaggttgaggttcgctcccgaaaggtaagacgagtctgggggggaaatgatgggggtgtccngcc

SEQ ID NO: 278 - DNA, 478 bp, Homo sapiens
  misc_feature 1, 371, 413, 444, 467, 468, 475: n = A,T,C or G
naggtctgatatctcctggtgctatccccaaactgccactcttaactcttgaagtaaataatctttgctggcaggactatgctgaatctccttaggcactctctaatcagatgtcctaggtcctcccaattcttagacatttaatacccatttttctcctccttttattcggaccttgtatcttccatttagcttctcaaatcatccaaaaccgtatccaggccatcaccaatcattctatacgacaaatgtttcttctaacatccccatgatatcaccccttaccacaagacctcccttcagcttaatctctcccactctaggctcccacgccgcccctaatcccgcttgaagcagccctgagaaacatngcccattatctctccataccaccccccaaaaattttcgctgncccaacacttcaacactattttgttttattntgtcttattaatataagaaggcnngaatgtnagg

SEQ ID NO: 279 - DNA, 429 bp, Homo sapiens
  misc_feature 223: n = A,T,C or G
gagaaatcgcttggacttcggggcggcctcggacggccatggcctttaccctgtactcactgctgcaggcagccctgctctgcgtcaacgccatcgcagtgctgcacgaggagcgattcctcaagaacattggctggggaacagaccagggaattggtggatttggagaagagccgggaattaaatcacagctaatgaaccttattcgatctgtaagaaccgngatgagagtgccattgataatagtaaactcaattgcaattgtgttacttttattatttggatgaatatcagtggagaaaatggagactcagaagaggacatgccagtagaagttattactttggtcattattggaatatttatatcttagctggctgaccttgcacttgtcaaaaatgtaaagctgaaaataaaaccaggggttct

SEQ ID NO: 280 - DNA, 523 bp, Homo sapiens
aaagaacatttttctagcatctttctacatctttccctaagtggcctcttgagcccagtcggattttggttatatgccatgatagtaatcataagaatcagttaaaaatgatccaaaaatgcacgaatacagtcgattccctctcatttattccttgtggaaaaagaaaaacacaaatcttaaaaactaaagcaagtcagggaagcctggaaagatacccagatttgataacatgttagaaggaaatccaggctaaggaatctcattttctagctttgatctggttgtcagttgggatggacttgcccaagtgatggcccacagaaaggccaaatttcttgtttttctcctcatcctgtacctcttttttcattaagaatcctgcctggaagtttaggtcaaagaggctgcttggagcaaaatacagtggtgtctcatcccaaatattctccaggcgtttcttccatccttccaggatttgaattcgggcgtctgctggagtgtgcccaatgctatatgtcag

SEQ ID NO: 281 - DNA, 344 bp, Homo sapiens
ccactggctgagttattggcctggcaggtatagagtccgctgttcttctcagtgatgttggagataaagagctcttgtgtgtgttgctggatgttcccatcaatcagccaagaatactgtgcaggtgggttagaggctgcatggcaggagaggctgaggttcacccctggacggtaataggtgtatgagggggaaatggtggggtcgtctgggccatagaggacattcaggatgactgggtcgctgtggtcaacacttaattcgttctggattccacactcatagggtcctacatcattccttgtgacactgagtagagtgagggtcctgttgtcattggacag

SEQ ID NO: 282 - DNA, 566 bp, Homo sapiens
  misc_feature 1: n = A,T,C or G
naggtccaaggcccctcctgtggggtgcccacctgtgcctttattccggctgtgccctcgactttccagcttcccatgtttctttggttaggtttctctcccttccttctttctccttccccaatccgcctgtttcgtcagggcccagtttgtttcctcatacaccttcctcactaccccaccccacatggttgactctttccctcagctccaccagctcttcatcatgccactcatttcagaacttgagcaaaacagggcagtcaggatctgatgtctttctggtctccctaagaaaactaagctcttgagggacagcccttggcaatgctttcctatctgctgagcatggtgaccttccttaggacttccagagttcagttccttctggcagagaggttttctttctccatgccatatggatgtgactcaaatgaggggtcccacagcttttcctggctaccacttgctgtgaccttatacatgttggggtttgctcttaaagaggagagcaggaagaaaggttggtttcagaaaccaagagggtcggcagtggacgcgtacat

SEQ ID NO: 283 - DNA, 363 bp, Homo sapiens
  misc_feature 99, 102, 115, 129, 150, 169, 172, 181, 183, 215, 223, 248,275, 286, 296, 304, 311, 318, 331, 359: n = A,T,C or G
cctcagaatttcatacaaacaccaagaccaaaatcctaagtattggtattgcgtctcaaatttttcccattaacttaaaaaaaaaaaagcttaaacttncgngccttacaggttnttaaatgaaactanaattaacaaacatgccaaaangtttcacttttaatagtanacncagctcctntnttgttttacaaaaaaataaaagcatgtttttnaacatgcntccaaaacagggttcaatttaacgnggcaaagggcaacatttaacataattnaactgcttttncctaaatacncttactgnttaagtncatcctntaactaacttganaaaagctggaacttaagtttaacagttntagt

SEQ ID NO: 284 - DNA, 483 bp, Homo sapiens
  misc_feature 462: n = A,T,C or G
ctgagcagcagactgatgaccttctgaggatgacagaatcctggttttcttctttatctcgggacccactggagctcttccgtggcattagtagtcagcccttccctgaactacactgtgctgccttaaaagtgtttacggccattgcaaaccaaccctgggctcagaaacttatgtttaacagtccaggttttgtagaatatgtggtggaccggtctgtggagcatgacaaagcttcaaaggatgccaaatatgaactagtgaaagcacttgccaattccaagacaattgcagaaatctttgggaacccaaattatttgaggctcagaacttacctgagtgaagggccatactatgtgaaacctgtttccacgacagcagtagaaggagccgaatgatttcttctagagctcatgtagaggaccacgttttgaccaaaacttctcctaaggcatttgactncatctatatttcacaaaagag

SEQ ID NO: 285 - DNA, 89 bp, Homo sapiens
  misc_feature 7, 9, 24, 25, 26, 27, 35, 36, 37, 39, 41, 45, 46, 47, 48,49, 76: n = A,T,C or G
cccccgntnttaaaacccggcccnnnnatttttannncncncccnnnnnggggrawtkggscccytwaaarsaadnttkaavggccccc

SEQ ID NO: 286 - DNA, 483 bp, Homo sapiens
aaagacatgccaatttgaaaaggcatcaaagtaaaaaaataaaagcaaatgctaaaaactactttacaataaaaaaattaaataatcggcaggttaaatgaatgtaaaatgaggaatgtacagtgaaaaacaaactaatataaagcattccagttgataaaaacctcctcaggcttatggtttgttttccaaggaaattatgtttcaatgtaaagtttgaaatactccagacatacattccatgtaggttttgggtgccaatgttaaaatttcaaattttgcatgcaaggcttagcaaagaaacactggcagaattccagcatttgcaaaattctaagttttggtgaatattgtaaatattacaattggtattagaaagccatgatgaatccagaattaagagaaaacccatttcataaatattttgtttgattaaaaaataccaggcttaccatgttctaaataattcaagaaaatatcttt

SEQ ID NO: 287 - DNA, 609 bp, Homo sapiens
  misc_feature 574: n = A,T,C or G
aaaatgaaacacacagcaacagaatacagtatgtttttaagagaattcattagcagatctataccattaaaatattagcaaagtgtatttccattgaattaatgtgttcttatagtacagccaagagatgcatacatcaatggctatcaaaatgtaaatatggacatatatggacacatctgcatacatctctacctgtataattccttctgcccctctgctgccaacctaatgaacaagtcctgacatacactgctcagaggtggcttaacaattccatgtccaagatgtatcctatcaattataacaaaggtatttacaaataggctaattcactagctctagtttttatcataagttgtcaccccattcgtaaagcttagatgttgcaaaataataactttgtccacaatgaacacaggcactttactaaaaacgctcttgtagacctgtggttatcatctaaaaccatcgtctagatatggagatactagcaaagagcccttcccttcacccttcctcttctccctcttccaccatccccgtgactaagtacaggatgtctagctccaangggtggactaataaaggtcactcccagaggacagg

SEQ ID NO: 288 - DNA, 495 bp, Homo sapiens
ccacagcatccccacgttctgagaagtacttggaaatggttgtctggaaagcttccactttggtcttgacggcattcaccctctccagcaccttctcctggattgctaccccaaaatcatttccatcttcaatcttggggatcaggtgttggatccatgtaatcaccagaatgcatttctctttgagagtccagacttctggcttaaccagggcaagcagggacaggactttctcattcccagggagaaatccacacttagggacttctttcttctcctgcttatctgtttccatctcatcatccttgggtggagggtctgggatggggatgtccagtggggcccggagggaagtcaagtcagccacattgagggagtcctcttgcaagagctgattcaggtatatgattttctgtggcaagaatctgtagaggaattcctcagcctcctggaaaagattctgtctgaagacctccacctgtttgcgggcttccc

SEQ ID NO: 289 - DNA, 477 bp, Homo sapiens
aaaataaaaaaaaaatttgcacttattcctcacaaaatcttcacttttggaactatcccaattgaagctacacactgaatttattaatacagcattaagtttctttgtgtaaaaaaatctttgtacacagtaataaaaaaagataaggcaagatgcattaaacagaaaccttctggctcttttcctctgcgtttttacagagccactgatgactatctgcaacaaaagagttaagtttctgattttccgtatcaagcatcttatgcctttgctgtggtaagaattctgtccgagcaccctgaaggacagatgctggtgatggtctttggcacttatgctggcaaactgagcttctttcccttgagtacttttgtaatgtacaagtagaagaagtcacagtataggatggtctggactacgccggccaccacagcaatgaggtcaaagaagccctcaaagtagaagcgccagatccag

SEQ ID NO: 290 - DNA, 534 bp, Homo sapiens
  misc_feature 1, 403: n = A,T,C or G
nggtaaaatgttttatttcatagctcataaaaaagtatgtatgtacaagactcaagtaaatagaaaggcagctttcaatcacaaatcagtttttcagattttactgtggaagcatatttaatgcacacatttgaatgttacacataaataattttaacgatggagtccaagttctggattttacattagatctgcatatataagacacttgtggtcaaatttcaagattggtaaagccagtttcaagctgcttatattttgagtacaggtttcactattacaaatatatgatgttaaactaacaaactcatgaccttcaaagatgtcttcgtcccacgcacacacatttgtaatttgtgtccatttgctatttcccttcttctataatcttcaaattatatangttatgcattgagttccctatgcatctcacccatctcctttatctcagccttctcatactttgccattctcttctttctggaaataaccagcacaacaattccagcaacaactgctatcaccacaaccaca

SEQ ID NO: 291 - DNA, 519 bp, Homo sapiens
ctgccgcctctgttccctcttcattcacttccacaaatgacttgtggacaatttttgatataaaaatatctctggctcctgacatgccagacagatcagccttgctactgttaaagagatcctgcacacctaggcgggcgaggtcggagttgagagtgtaactctcttccagtttgaacctgggcaagctgacattaacttcaatgaaatcgagattctcaggtttagtccactcatgcaacttttccaaagtcaactgttcctcaatcttcttcaggcccgtggactcgtcctcaatgtcatccggcagcaggatgaccatgctgagctcctcgccttggtaaggcagttccagcacacggcacttaaggtcctcgatgtagccatatgcaaattttttcttctgatacatcattttcacagtttttctgtctttcttattcaatctgaatggtgcattcgtcgtggcttctttcatgaatttatccttccagtttcccttgaaatagatggcattta

SEQ ID NO: 292 - DNA, 599 bp, Homo sapiens
ctgacatgcctaatcgctccttaagagacttggaaacttgagctttctttggtgttttgtcaatgttagtttctggagcttcaactttcttccctagcctctgtgccaggctacgctttaatggaggatcactgtcaccgcctgctgaaaattttcgtttccccagtctctcagtaagactcaatctaaccaagggttcttctccttgtttggtggagagagttactgtcctcaccacagtcctgacattttctttttcaggacctggaacgggctcagggtggagtaaaagactggaaactcctgaagaaccctcaccttgcttcttagatttttccttcattttctttgacttaatttcctcaagagtttttattccaaaattcaaacattcaccttgctttatattgactgcaggtttccggacagaagtcacccgtaatccattgtgaacttcaggagttggttgcagggtaggtgttttggtttcatcaccttcctcagaaaactgatcatcatcatcttcatcatcatctgcagcattaattacaactggtggatgccgtggggctaggaacattttcggaactttctacttt

SEQ ID NO: 293 - DNA, 478 bp, Homo sapiens
ctgcagcctgggactgaccgggaggctctgattatttacccaccacaggtaggttgtgttctgaatctcaggttcacaggttaaggctacagcatcctcatcctccacggggttggagttgttgctggtgatgaagggtttgggtggctctgcatagactgtgatcgtcgtgactgtggtcctattgaggccagtgtctgagttatgggcttggcacgtataggatccactattattcacagtgatgttggggataaagagctcttgggtggattgctggaaagtcccattgacaaaccaagagtactgtgcaggtgggttagaggctgcgtggcaggagaggttcagattttcccctgatctgtaagatgtgtttagaggggaaatggtgggggcatccgggccatagaggacattcaggatgactgaatcactgcgcctggcactcactgggttctgggtttcacatttgtagctt

SEQ ID NO: 294 - DNA, 438 bp, Homo sapiens
  misc_feature 357, 410: n = A,T,C or G
ttacagcttcccaagttaggttagtgatgtgaaatgctcctgtccctggccctacctccttccctgtccccacccctgcataaggcagttgttggttttcttccccaattcttttccaagtaggttttgtttaccctactccccaaatccctgagccagaagtggggtgcttatactcccaaaccttgagtgtccagccttcccctgttgtttttagtctcttgtgctgtgcctagtggcacctgggctggggaggacactgccccgtctaggtttttataaatgtcttactcaagttcaaacctccagcctgtgaatcaactgtgtctcttttttgacttggtaagcaagtattangctttggggtggggggaggtctgtaatgtgaaacaacttcttgtctttttttntcccactgttgtaaataacttttaatgg

SEQ ID NO: 295 - DNA, 320 bp, Homo sapiens
ctgtcctcccctcacaccagactggggagttcaggatgtgtggtcttctcttcgactacccagtggtcttggctgttcaaccgtactttctccagaaggatcagctcaatttgctgctcagatatttgggttaagcaaccatttggtatggagcaaactgcgagcaagcattttgaacacatggatttccttgaagcaggctgacaagaaaatcagagaatgtaatttataagaaagaatgccattgaattttttaggggaaaaactacaaatttctaatttagctgaaggaaaatcaagcaagatgaaaaggtaatttt

SEQ ID NO: 296 - DNA, 565 bp, Homo sapiens
aaagatgaattaaatgcccaatttggggaggcatggcaggtgtaagagaaaggaaaagcttaagaaaacatttcctgataataccaacctttctttcatcatctactgcatttgacagaaattaaccttttagagtttttacccgtgacactttcattccttgtacaatgtagtgtaaatctccacttcgtattttgtcaaaatactgtctttgtcctttgatcacacacaccccacccggcacacccacagctaaacagaattcttcattagaggaaatagcagttctgttcaaaatctccgcaaaagctggtcagaaaactcgctatgaaatcacaaagactgatccaaagagctgagctgctacgctcactccattacagtacaatgttatgtcgggaacacgtgctgctaactcactggtgagttcaatggcaacgcttcattcgggaggctgttctgctttacgcatctgagaactacataggagagcaagtgtctgcacctcctaactgcagaagctaccgtcttctcaaagacgaaggtctttgtaaagttcagtgct

SEQ ID NO: 297 - DNA, 594 bp, Homo sapiens
  misc_feature 543: n = A,T,C or G
ctgtccaatggcaacaggaccctcactctattcaatgtcacaagaaatgacacagcaagctacaaatgtgaaacccagaacccagtgagtgccaggcgcagtgattcagtcatcctgaatgtcctctatggcccggatgcccccaccatttcccctctaaacacatcttacagatcaggggaaaatctgaacctctcctgccacgcagcctctaacccacctgcacagtactcttggtttgtcaatgggactttccagcaatccacccaagagctctttatccccaacatcactgtgaataatagtggatcctatacgtgccaagcccataactcagacactggcctcaataggaccacagtcacgacgatcacagtctatgcagagccacccaaacccttcatcaccagcaacaactccaaccccgtggaggatgaggatgctgtagccttaacctgtgaacctgagattcagaacacaacctacctgtggtgggtaaataatcagagcctcccggtcagtcccaggctgcagacctgcccnggcgggcgctaagggcgaattctgcagatatccatcacactggcgggcgct

SEQ ID NO: 298 - DNA, 477 bp, Homo sapiens
  misc_feature 5, 31: n = A,T,C or G
tttgnaaatctgatctctgtcttacaacttncttcagaacacccattagaatatctgtagccagtgtcctctcatgagcctcatcaagaattattacaccataacgctccaggaggggatcattcatagcttcacgaagtaacatcccatcagtcatatacttaagaatggtttttgcactactgcagtcttcaaatcgaatggagtaaccaacttcctggcccaacatcacatccatctcatcagcaactctctgagccacactcattgcagccactctcctgggttgggtacaggcaactcctctcttgggtcctggtaatgatcgcatgtactccacacaccactgtggaatctgtgttgttttaccagacccagtctcaccaaccagtacaaaggactgatgtctaaccagaatatctgtaaacctatccttgtattcccaaacagggagctgaagacgtttctttagaatat

SEQ ID NO: 299 - DNA, 452 bp, Homo sapiens
ttgaagatggtcccttacagcttcccaagttaggttagtgatgtgaaatgctcctgtccctggccctacctccttccctgtccccacccctgcataaggcagttgttggttttcttccccaattcttttccaagtaggttttgtttaccctactccccaaatccctgagccagaagtggggtgcttatactcccaaaccttgagtgtccagccttcccctgttgtttttagtctcttgtgctgtgcctagtggcacctgggctggggaggacactgccccgtctaggtttttataaatgtcttactcaagttcaaacctccagcctgtgaatcaactgtgtctcttttttgacttggtaagcaagtattaggctttggggtggggggaggtctgtaatgtgaaacaacttcttgtctttttttctcccactgttgtaaataacttttaatgg

SEQ ID NO: 300 - DNA, 453 bp, Homo sapiens
ctgcactaattgtgcatattactctgcctaatcttgtgcatgttttcattgatttccctctcccggcttttgcttctcttgaaactgttgcccagtcacttctgctccaattctcttcctctctaaatagtagtttattactgccacatctccatgcatcagcaaaatgttggtgacatttttctagcctggcagaacagattacttaaagctatttcatttcaaagcagactgaatgtgacttcatctaaaggcagcattaggtactgcatggaaataggtcattaacttgaaactcttatcaaaatatattttaccagtttccagaatttccagtacaggaccgcctgaagagagagccattgttcaattccaattcagtgtgagtgacaaagtgaaatttagaagtgaagttgtctatttgatatttaactctttattaaatctttcttt

SEQ ID NO: 301 - DNA, 495 bp, Homo sapiens
ccttacaaataatactccaatgaatcagtccgtaccaagataccccaatgctgtaggattcccatcaaacagtggtcaaggactaatgcaccagcagcccatccaccccagtggctcacttaaccaaatgaacacacaaactatgcatccttcacagcctcagggaacttatgcctctccacctcccatgtcacccatgaaagcaatgagtaatccagcaggcactcctcctccacaagtcaggccgggaagtgctgggataccaatggaagttggcagttatccaaatatgccccatcctcagccatctcaccagccccctggtgccatgggaatcggacagaggaatatgggccccagaaacatgcagcagtctcgtccatttataggcatgtcctcggcaccaagggaattgactgggcacatgaggccaaatggttgtcctggtgttggccttggagacccacaagcaatccaggaacgactgatacctgg

SEQ ID NO: 302 - DNA, 548 bp, Homo sapiens
ctgcatattcagatatcctcttcataattgatattttatccgggtgaagcttgtcatgggaacacaggcaagcgtgattatcaataggtttggtaggtgttgattcatccaaccacttttgcagccattccagagggacaaactcatagggctcagctccagcaggtaacctttggtacagctccttaacctcttcgtgttttgcttttcctttatccacactttgcttacgcatctcagccatttcaatacaccactcctcaaatttggaattatcccgatccaccagctcttgaagaaaggctggaacttgaacagtagtgttgggcttttcttgagtttgcagtctataaaccaacatatatgcatttcgagagcaatgagttcctttgccacacttgggtttacgtgtctgagacttagaaggttctgctagatcttcctcaatccctagttgtaatttcttcccctccatcttttctatgtcctcatcattaaacttataccattcaccagactgtggatctttcacgtgggcgatgtagtgg

SEQ ID NO: 303 - DNA, 479 bp, Homo sapiens
  misc_feature 470: n = A,T,C or G
ttggacgagttggtggtaggatgcagtccagagcctcaagcagcgtggttccactggcattgccatccttacgggtgactttccatcccttgaaccaaggcatgttagcacttggctccagcatgttgtcaccattccaaccagaaattggcacaaatgctactgtgtcggggttgtagccaattttattaatgtaagtgctgacttccttaacaatttcctcatatctcttctggctgtagggtggctcagtggaatccattttgttaacaccgacaattagttgtttcacacccagtgtgtaagccagaagggcatgctctcgggtctgcccattcttggagataccagcttcaaattcaccaacaccagcagcaacaatcaggacagcacagtcagcctgagatgtccctgtaatcatgtttttgataaagtctctgtgtcctggggcatcaatgatagtcacatantacttgctg

SEQ ID NO: 304 - DNA, 480 bp, Homo sapiens
aaatgcattcttcacaagtaattcagcatatatttttatatcatgtttacttatgcttaagaattaaagcaagtatatttattactctgatggaaatatgggaaatctctcattcatgcaatatacagggataatattcaagcgaagggaaaattcccgctttttatttttgtaaatgtatccatatataatcatcgacatgacagatgaggaaacccatgaagtttcccactagtcagatatacattttcacttcatcagaagcacctgatatctacagctaatttataattagatactgtttcaatgaaaccaaaatgagccctacaagttcctataaacaaaagcttccaatgtactaggacagtcagtaattaatgcatcattcagaggattatggctgttccttaagaagtgcaagttcaaacctgtcaacaccagaggtaatcattttatattaatttatacgtaataccattt

SEQ ID NO: 305 - DNA, 481 bp, Homo sapiens
ccagccgaaccagctctgagatgagttgggtagatctgaacatccctgataccccagaagctcctccctgctatatggatgtcattcctgaagatcaccgattggagagcccaaccactcctctgctagatgacatggatggctctcaagacagccctatctttatgtatgcccctgagttcaagttcatgccaccaccgacttatactgaggtggatccctgcatcctcaacaacaatgtgcagtgagcatgtggaagaaaagaagcagctttacctacttgtttctttttgtctctcttcctggacactcactttttcagagactcaacagtctctgcaatggagtgtgggtccaccttagcctctgacttcctaatgtaggaggtggtcagcaggcaatctcctgggccttaaaggatgcggactcatcctcagccagcgcccatgttgtgatacaggggtgtttgttggatgggttt

SEQ ID NO: 306 - DNA, 455 bp, Homo sapiens
  misc_feature 1: n = A,T,C or G
naggtaaaatctctggcttcaaagtttcttggggaaaggtcggtttacctcacattttttgtttccattagtaatattctaggtacctcacaaaatgtattatggtgccatggctgttagtttttagtgagtgctgtaggattaattcgaaaataggcagaattccattcctcccaaggtggcaaaaattagctatactgatgtaattgtcatttacctgggtatgaattccctgacacacattcatgtcaacatatgtagcaaattttgtgaaaacataacaatttgaagcttctgtaattttgagcactgctctaacaacaagcataatataaaattagttagattttgcaagtctacaaatgagctcttgcaacagaactcacagcctttttacttttttcccctaactttagcaatgtagtatcttgagccattaatttttgggttttttt

SEQ ID NO: 307 - DNA, 554 bp, Homo sapiens
aaaatggattccactgagccaccctacagccagaagagatatgaggaaattgttaaggaagtcagcacttacattaagaaaattggctacaaccccgacacagtagcatttgtgccaatttctggttggaatggtgacaacatgctggagccaagtgctaacatgccttggttcaagggatggaaagtcacccgtaaggatggcaatgccagtggaaccacgctgcttgaggctctggactgcatcctaccaccaactcgtccaactgacaagcccttgcgcctgcctctccaggatgtctacaaaattggtggtattggtactgttcctgttggccgagtggagactggtgttctcaaacccggtatggtggtcacctttgctccagtcaacgttacaacggaagtaaaatctgtcgaaatgcaccatgaagctttgagtgaagctcttcctggggacaatgtgggcttcaatgtcaagaatgtgcctgtcaaggatgttcgtcgtggcaaccgttgctggtgacagcaaaaatgacccaccaatggaagcag

SEQ ID NO: 308 - DNA, 503 bp, Homo sapiens
  misc_feature 1, 142, 160, 188, 231, 348: n = A,T,C or G
ngctgaggagaccagacccctacatcacctcgtagccacttctgatactcttcacgaggcagcaggcaaagacaattcccaaaacctcgacaaaagcaattccaagggctgctgcagctaccaccagcacatttttcctcanccagcccccaatcttctncacacacacctccttatggatcgccttntcgttgaaattaatcccacagcccacagtgacattaatgcacnaggagtcggggactcggttcttcgacatggaagggattttctcccaatctgtgtagttagcagccccacagcacttaaaatctgcctgcatcctgtccaggatcgaagcagtgtggntgtttttcgggtaattctccatctgctgccggaagttgttattaaactctgacatcaccttatctctaaacacatagccagcaatggctgcggccacctccaccaacatgataagagacagaaagatggcaaacgtgatcataagacaatagttc

SEQ ID NO: 309 - DNA, 582 bp, Homo sapiens
aaatagctgagcacctactggaagaattcctgggctaaatgctgaaaataaaatttaatttctgcacagaaaataccattaacttagtagcctttgcttaaaggtgggattaattctccatgaagtcagaatgagacaataagcagcattaacttcataggcacacagaactagtgctcaaactgctagcacaaattccaacagagtacataaggctaagtcactactcaagtgtccatttccatcaaatttagagactctccctatgcatctaagggaaggaattatcactgaatataaatgcctccaggagaaacggagaattcagttaaggttaaattagacaaaagataataagtgcaagtactagagaaatgttgctggagataaaccataaaatttgtgacactaacgtggcatggggtgaatcacataagctgctagctgttgaacaccagtgtttcaagatacaacttttataaacgttttatttgttttgcttataccatcagaactgaaactactgtcccgtgatttccctgaaacagggaaatcaatctaaaacacatactggtgcctttc

SEQ ID NO: 310 - DNA, 476 bp, Homo sapiens
  misc_feature 1, 442: n = A,T,C or G
naggtaaagaaagaaactttcaaagttttgtcaatacttaaactgggaaatactcaatatctaaatccaggtcaggcatgggatatcagtatttaacattggatgttttatgttttatatttataatgttcaaaatgcaagcataacatttaatatttgtccacatggttttacaaaagtaaatcttaaattactaagcttttcccatatgttctcgtactttctcaaatccctataaagaattacttgttatctattaaaaatctcctttacccaaatctgtattatggtttcgccagacaaatattatgtgatgtagcccagaaaatccacaccttttgtcctttttatgttttaatttgaataatcatgtgcttagtcccttggtttactgccacatcagtttaacacgatatcagcacattcccttgtcatcatcaangtgttggctcagatttattcttaattggatgttt

SEQ ID NO: 311 - DNA, 500 bp, Homo sapiens
ctgccccccacccttcccttcgatgacaacgtttgcaggcttcagggggaccagggaacaaagctggggcctggcagccccactacgctgccagccggggagaacaagtcacaattacaaattatcacaacaattagcgcctgtacttgggggatctgcaaattgaggaggccccagctcctcattgtacacgggtctatttggcagtgaccttgctctggagacgatgatattccttcagcctgagggaattgatgttgatgaacccggtggcatcagttggctcataatcaccctgcacgttcatgctcaccagctcctcattgtagagagacagtggggactcccggccgaggatgtacacctggcccttgaggacggacacctgcactttcccttccactcgctcctgggacttggcgatgcagtggcggacaaattcacacccagggctgtgccagaaaccggtatacaccagctcagcaaatttcaagcccagg

SEQ ID NO: 312 - DNA, 505 bp, Homo sapiens
  misc_feature 1, 500, 505: n = A,T,C or G
naggtctgtccaatggcaacaggaccctcactctattcaatgtcacaagaaatgacacagcaagctacaaatgtgaaacccagaacccagtgagtgccaggcgcagtgattcagtcatcctgaatgtcctctatggcccggatgcccccaccatttcccctctaaacacatcttacagatcaggggaaaatctgaacctctcctgccacgcagcctctaacccacctgcacagtactcttggtttgtcaatgggactttccagcaatccacccaagagctctttatccccaacatcactgtgaataatagtggatcctatacgtgccaagcccataactcagacactggcctcaataggaccacagtcacgacgatcacagtctatgcagagccacccaaacccttcatcaccagcaacaactccaacccccgtggaggatgaggatgctgtaaccttaacctgtgaacctggagattcagaacacaacctacctgtggnggggn

SEQ ID NO: 313 - DNA, 444 bp, Homo sapiens
ccaaggtcagaggctgatgcaacaggccctcttctccccagggccaggctcctgtccagcctgggcactgcccagagtgatggcattggtccggatgctgttctgtctctgcttggacaccttcgcaaagatttctttcaggacagtctcaaaggctagctcaacattggtagagtccagggctgaggtctccaggaagagcagtccattgttttcagcgaacattcgggcctcctcagtgggcacttcccgggcctggctgaggtcacttttgttacccacgagcatgacgacgatcgtggcttcagcatggtcatagagctccttcagccatcgctccaccacagcataggtctggtgcttggttaggtcaaacaccaggagggcccccactgcaccacgatagtacgcccgaggtgatggctcggtaccgctccaggccag

SEQ ID NO: 314 - DNA, 351 bp, Homo sapiens
  misc_feature 14, 23, 128, 152, 345: n = A,T,C or G
aaatcatgaaaatnctacttgcnactataaaagagaattgtggacgtaaaatggttgtgctatttggataatggcactaggcagcatttgtatagtaactaatggcaaaaattcatggctatgtgatntataaaataaaatattctttgcantaaaatattccctttgttaatgttatagaaggggggatacaaaaaggaactaacaatttgtatggcagtgtcagatatttcattttagtatttcctgttttggtttatttgcatcttataagagcataatgacattgtttgatgaagcctaattatgctggactgttttgacctggtttaacccttctgatangtagtt

SEQ ID NO: 315 - DNA, 505 bp, Homo sapiens
  misc_feature 1, 3: n = A,T,C or G
nangtctgccccccacccttcccttcgatgacaacgtttgcaggcttcagggggaccagggaacaaagctggggcctggcagccccactacgctgccagccggggagaacaagtcacaattacaaattatcacaacaattagcgcctgtacttgggggatctgcaaattgaggaggccccagctcctcattgtacacgggtctatttggcagtgaccttgctctggagacgatgatattccttcagcctgagggaattgatgttgatgaacccggtggcatcagttggctcataatcaccctgcacgttcatgctcaccagctcctcattgtagagagacagtggggactcccggccgaggatgtacacctggcccttgaggacggacacctgcactttcccttccactcgctcctgggacttggcgatgcagtggcggacaaattcacactcagggctgtgccagaaaccggtatacaccagctcagcaaatttcaagcccagg

SEQ ID NO: 316 - DNA, 470 bp, Homo sapiens
aggttaggagcagagcttccgggctgcgctcttcgttgcccagtttccgctcagtggtcgcgtctccgccccccacccaccagtcccgctgcattctcggccgggctctaggcgccatggctccccgcgggaggaagcgtaaggctgaggccgcggtggtcgccgtagccgagaagcgagagaagctggcgaacggcggggagggaatggaggaggcgaccgttgttatcgagcattgcactagctgacgcgtctatgggcgcaacgccgcggccctgagccaggcgctgcgcctggaggccccagagcttccagtaaaggtgaacccgacgaagccccggaggggcagcttcgaggtgacgctgctgcgcccggacggcagcagtgcggagctctggactgggattaagaaggggcccccacgcaaactcaaattccctgagcctcaagaggtggtggaagagttgaag

SEQ ID NO: 317 - DNA, 439 bp, Homo sapiens
taggtctgtttgcctgcctctcctagcaggaggccagcattcccaaagggattctttagagcactgccaagcccagagagctcctttcctttgtccatacagccctgcagagccacaaacagccgaagaatgtcatttgtcccctcaaagatccggaagatgcgaagatctcggagcacacgctctactccaggttccttcatgaagcccataccccccatgatttggatgcattcatctgtcaccttccaggctgcctccgagccaaagattttgctgatggcggcctctatctggaagtccgtgactccctggtccatgttagcactcaccatgtaagccatggactcagttacatactgcagcataaccatccgtgccagcttctcctggatcagcccaaagttgtgaattttctccccaaactgggtacgaataa

SEQ ID NO: 318 - DNA, 409 bp, Homo sapiens
  misc_feature 349, 355: n = A,T,C or G
caggtctggaaggagagcaagcacaaagtcatcatggcttcagcgtctgctcgtggaaaccaagataaagatgcccattttccaccaccaagcaagcagagcctgttgttttgtccaaaatcaaaactgcacatccacagagcagagatctcaaagattatgcgagaatgtcaggaagaaagtttctggaagagagctctgcctttttctcttgtaagcatgcttgtcacccagggactagtctaccaaggttatttggcagctaattctagatttggatcattgcccaaagttgcacttgctggtctcttggggatttggccttggaaaggtatcatacataggagtntgccanagtaaaattccatttttttggaagatcagctcccgtgggggcttgggtttttgg

SEQ ID NO: 319 - DNA, 592 bp, Homo sapiens
  misc_feature 317, 470, 491, 498, 527: n = A,T,C or G
aaagactgcttgtccctgtagaccagtaccttgtcttataaaaagatgattgtggtcgccctgcagtggggctttgtacacatcaaacacttcattgcctaaatgcagggacatgcttccatctgaccacttgactatccgagcattgctttctttaatttcatttccttcttcatctcggcgtatcctccatcttatagtattttctacctttaattttaacctggttctaccttcttcatccagcatttcttcatcttcaaattcatcttcataatactgaggatcaaaaggtctgggctctacactgagaaagntgggcagtttaacaaaatataagtcgtttcctaaatcagtgtttactttgggtatttctacttctattctggtctcaggaattggctcctcttcctgttgatcctgaggcaatccattttcatcaacaggctgtcctggagtaggtggggggncttctccatcactccctgaanagatatnatctgcacctccaaataaatccatggttncactattatcttttggcacctcagtgtcactatccgcttctgaatcagatgcaatcgcattcttg

SEQ ID NO: 320 - DNA, 500 bp, Homo sapiens
  misc_feature 1: n = A,T,C or G
naggtaaaaagtcaatcaccttgctgaaattcagttcatgaaatggctaaccattcagagtgcaacagaaacatccagcgtaaccaaatattgtttaacatggccctatgccttatgcaatatgcatcttgcctacttcttttcacttcaaacaattcgtttccaaactcatacaaacccttactcactcttgcctgaaaattctttgtactttctactgcttttgcagaaagcaattttctacccaatttggctccttcttatcactcctggtctcagctaaaatgtcacctactttaataacccctctgaccatccttacctaagagaacccagttctagacacattctattttattactgtgttagattcacagcatttgttactatttcacattatcttgtctacttcctacttgagtataagtttcatgagggagaggaccaaggaccatgtagttcctgaacaccaacaggtattcatagcacctaggcttgtt

SEQ ID NO: 321 - DNA, 345 bp, Homo sapiens
  misc_feature 188, 261, 310, 339: n = A,T,C or G
cctggctttactaactattgtcacactcatccacagccgaagatccactttgtgacaatagttagtaaagccaggttttactcaaagaagcaaaagatgagctcagtgaaggacaaatcagatttcctgtgaagcaggcttgtcaggctttctttcctatttcctattaggtccatctcacggcaganttggcggcaagggcgggggcagcatgttcttggttctgtctccttcattccagtactgttcagtctgcatttncgtgagtcgggaaattgtgcgctgaaatgcaaagatttcctcttctccngtaaacatggagagtacttctgctgaatnctggct

SEQ ID NO: 322 - DNA, 512 bp, Homo sapiens
  misc_feature 134, 148, 231, 318, 414, 418, 474, 487, 498: n = A,T,C or G
aaaaaaaaaaggactgcaatttaacagtaatctgtatatctttagctgccattaaaaaaagaaaaaagaacaaccaaaaacaatgaaaatgttacaactggtataaagtaaccctatgatgctccccttacganaaaacaaaactgtncacatttataaacaaacagtctctcccatcagttaacacacagagccttctctacaccaaagtctctttccgtttgccaccanaaagggctttgtccctcgctcttcggatgccgggctgtgtctggtgtgtctttaagctcttgctgtcctctgccatctgcatgccanagccacatctgtaagcgttttcatcaacttctacctgagtaacactggaaactgtggatgccctcctctgggctgtgagtttcctcgcagaggggnggtncccctcacactcttcgtgcagctccggcaggccctgcagctcagacctgcccgggngggcgctaagggngaattctgcanatatccatcacact

SEQ ID NO: 323 - DNA, 495 bp, Homo sapiens
aaacaaattatgcttcatgtttcctggcttaataaaaagctacaatttttattatccaaattaagaaatattatactaatcaaaagctattaattttgaaatgtctatgtatgtctgtctgtaggtccccttagaacctttccaaacatttataatcaagagattttaatcaattatgtactagaatcatattaaagaaaaacttattttgcaaaaataaaatcactttccaatatgcttgacagaaacaagctattcattttcatttgtgttccactgaagacattactgaaatctgttcaatggtttatttccaagtggtccactatggaattcttcggaatgttttaagattggctgtagctagagttctgacttccatttggaccctgctctccttcactgtttggaggtggttttggttttggcatcttactaagaatggttgccatctcttttctctcatcgaaattcttccactgctcatatagtttt

SEQ ID NO: 324 - DNA, 307 bp, Homo sapiens
aaaggggtttgactgacgataggttgatgcatccacagattcatttgttcccgatctggcaatacaggaccatagaaaacaccaaacccagtatctcaataactgccagtccaaatggtattccaataactataatcaaattttttgccaagaagtcttttatgaaagaaatacaggtctctttgtaaacttgttttccattatagctttggcatggtctctgcttatctagacaggcacataattcaggatagtgttgaaaattatttccccaatcagcagctccattgaccaaaccgcagcattt

SEQ ID NO: 325 - DNA, 450 bp, Homo sapiens
ctgggaaatgttgccagaggaataaacattgccattgtcaactatgtaactgggaatgtgacagcaacacgatgttttgatatgtatgaaggcgataactctggaccgatgacaaagtttattcagagtgctgctccaaaatccctgctcttcatggtgacctatgacgacggaagcacaagactgaataacgatgccaagaatgccatagaagcacttggaagtaaagaaatcaggaacatgaaattcaggtctagctgggtatttattgcagcaaaaggcttggaactcccttccgaaattcagagagaaaagatcaaccactctgatgctaagaacaacagatattctggctggcctgcagagatccagatagaaggctgcatacccaaagaacgaagctgacactgcagggtcctgagtaaatgtgttctgtataaacaaatgcag

SEQ ID NO: 326 - DNA, 285 bp, Homo sapiens
  misc_feature 64, 66, 84, 93, 106, 108, 109, 130, 133, 137, 140, 167, 170,241, 250, 256, 266, 280: n = A,T,C or G
gagctcggatccctagtaacggccgccagtgtgctggaattcgcccttagcgggggcccggccntnggtaaactataacctgtnaatctttantcaggcagcaagntnntataaaggcaaactgcttatncanaagngancacggaacaactcaaaggcagagcaanaangatgagaaacatctgactggccgatagagatttcgatctctcactatatgaaacaaacttttcattactangaagggtanactatnacttcaatanacaccaacacaganagact

SEQ ID NO: 327 - DNA, 501 bp, Homo sapiens
  misc_feature 498: n = A,T,C or G
ttcgagagtataatattttttattcactgataaactaaaagccaatttcttggtatttctcatgtatacttcatttattttattaataagcaaagccctgtaaggggagcctttgcctagtcctccgactctgattcatcttcatcttgactaatctggaagtaacgaagttcgtaggtctccttgtcagatgcaaccactcgaagccaatcacgaagattgttcttcttaaggtatttcttggtaaggtatttcaaataccttttagagaactgtttctcagaaacaactgtgattttattcttgaagcgttcaatgtgaacaacattcccgagatttccagttttgccattgactttaaccttctcccgtagaaattgctcaaaatttccagaatcaaaaattccatcttctactggatgagtaaggtccaaattaaacctccaggttgacctcttgggcttccagtctttctgcggcgccatcttgcgagtcggncgc

SEQ ID NO: 328 - DNA, 565 bp, Homo sapiens
  misc_feature 1: n = A,T,C or G
nttggtaaaataaggtgcaaagaaggactgcaacaacaaactccctcatccacacctccaataacatctcactgttgttcagcataatctaccatgaactgattcaggagcacacctagagctatattcacagctcctgaatgtaccatgttttctataccagaagcctcttcaatggcagtgtttctctgttcagaggtcattacaataacttttgtcactgctggcctggacttaacattccagattccagagccagtgttttattgtcccagctcttttcttcctctttaggatttatcaattttagaaaaagggcatgtttgttatgctattttcaaagggcttgtgcgtatcacattttaccacattttaccccaattttaccacactggggaatgttgtcacattccccaagctagaaatgttttccaaaaaccacaggtactttctgtaatcttgttgttcaaagtacaaaattcttacatgttaaaaaattttttaattggagattagtacctctgctttcttctgacagaagtacacaattcattataccatgttt

SEQ ID NO: 329 - DNA, 525 bp, Homo sapiens
  misc_feature 514: n = A,T,C or G
ccaggttactaccagtgcaggagaattttcttcttaaattccagggaatcaaaatgtgtgggaaagagttcaataaggcttttgagctgtatgatcaggacggcaatggatacatagatgaaaatgaactggatgctttactgaaggatctgtgcgagaagaataaacaggatctggatattaataatattacaacatacaagaagaacataatggctttgtcggatggagggaagctgtaccgaacggatcttgctcttattctctgtgctggggataactagagttggtggccgcaaccacttgctagtgatacactgtatctaaaaaataactgtgcactataagggagtaggctgtattttcttttatatctgtaaatttaactgcatatagataattatccaggatgtgtggctcattcttttcagcttgtttctatactgtttgtaatatacagtttttgtaaccatatgattgaaaagaagaaagtctatgcttaggccagtcagtncacccaatttt

SEQ ID NO: 330 - DNA, 607 bp, Homo sapiens
  misc_feature 1, 15, 165, 520, 564, 604: n = A,T,C or G
ncaggtaaatctcanacctgggaaatggactatacacagccttctaggggagaagagaaatgccttagatgttctgacagcactgcacctttggcttgttttcagtggttggtggaacatgaataggaaccacattgttgcttggagacatgtcattttcgcgtntgtctgacatttgcttctgagaaacaatgcggtaaatctctgttaaaattgtctgaaaagcagcttctacatttgtagagtctagggccgaagtttcaatgaatgacaaaccattcttttctgcaaaagctcttgcttcatctgcaggaactgccctgagatgacgtagatcactcttattgcccacaagcatgataacaatgttactatcagcatgatctctcagttctttcagccatcgctctacattttcatatgtgagatgtttagcaatgtcataaaccaataaggcacctacagctccacgataatatgctgatgttatagctcgatatcgctcttgccctgctgtgtnccatatctgtgcctttattgtttttccatcaacctggatgcttnttgttgcaaactctactccaatggggctcttgctttccanatt

SEQ ID NO: 331 - DNA, 508 bp, Homo sapiens
aaagacatgacttcatttcatcttcaccacaactccatgaggtaggtgttatgatccccacattacagatgaggaaaccgaggttctgggcactgatttcatttgtttgaagtcacacagcttgtgagtggtgaggctggaatttgagcccagatgggctgaacccaaggcagagcttgcaaagttgtgacatcagtacagtgtgttattgtacccgtccaggggccacagccctcaccttcctttcaaaccccattctcaggatagggtctgaaactcctgcctgcagaaaaggcttgtgtgtctccctccctggtggacctgcatttcgctttgttctatcagaggaatgaagctgaaatcgtgcaacgtcaggcagttgccctggctgggaatgagctgcaggccacacccctccctagagtcctaccgtcctgctggccctggccttggcagaagtgcaggttgttctgggttctgcccagcctccttctggttcttttccagg

SEQ ID NO: 332 - DNA, 653 bp, Homo sapiens
  misc_feature 1, 562, 599, 618: n = A,T,C or G
naggtctgtgagcaatttgaatgcttgatatacttgagcttcctttacaccacctccaagatccaagaagttggctggcttcccaccattaaggaaaatgatatcacaagtagccatggcgagcccagcaccattcacaaagcaggcaatgttcccatctagtcctatgtattttagatcatatttggcagcttcattttcaatgggctcattctctgatttgtcgtccatagcaaatatgtctttttgtcggaattctgcgttgtcatcaaagtttatcttggcatcaaaacagacaacttgtccttctggagtttcaccaaagggattcacttccacctgagtagcatcaattttcaggaagagattatacagcttcgtaatttgatctgcagcctggcttttcaaaggcccaacgaagcctagattttcggccatccgctgagcttggctgtcctttattccttcaaaaatgtcaatttgctccttaaaaatgagctccgggtttgaagcagccacctcttcaatgtcgacgcccccctgggggctgcccaccagcacngggccattgcaggaccggtccatcagaattgccaggnaggtttctctggaaatatncaaggcttcagcaaccatcaccttggtaactttca

SEQ ID NO: 333 - DNA, 472 bp, Homo sapiens
ctgctgggcatgctgtgtgcttgcatcgtgttgtgcagaaggagtagagatcctgcttacgagctcctcatcactggcggaacctatgcatagttgacaactcaagcctgagctttttggtcttgttctgatttggaaggtgaattgagcaggtctgctgctgttggcctctggagttcatttagttaaagcacatgtacactggtgttggacagagcagcttggcttttcatgtgcccacctacttacctactacctgcgactttctttttccttgttctagctgactcttcatgcccctaagattttaagtacgatggtgaacgttctaatttcagaaccaattgcgagtcatgtagtgtggtagaattaaaggaggacacgagcctgcttctgttacctccaagtggtaacaggactgatgccgaaatgtcaccaggtcctttcagtcttcacagtggagaactcttgg

SEQ ID NO: 334 - DNA, 563 bp, Homo sapiens
  misc_feature 1, 16, 478, 511, 528, 532, 559: n = A,T,C or G
naggtaaaaaacttcnaaagtcacagacacagaatttaggaagctgaaggctgagagtctcccttctcacttaatccatgctttattttgcattcctcacaggtaaggaggcagtgcctgttatgctgtggaccaaaaccagccccacggagctgatcttcaaaaaaatggaatttactctggcatactcctatgtatgatacctttccaaggccaaatcccaagagaccagcaagtgcaactttgggcaatgatccaaatctagaattagctgccaaataaccttggtagactagtccctgggtgacaagcatgcttacaagagaaaaaggcagagctctcttccagaaactttcttcctgacattctcgcataatctttgagatctctgctctgtggatgtgcagttttgattttggacaaaacaacaggctctgcttgcttggtggtggaaaatgggcatctttatcttggtttncacgagcagacgctgaagccatgatgactttgngcttgctctccttccanttgnttatcctctgcttactccttgacccanaggg

SEQ ID NO: 335 - DNA, 473 bp, Homo sapiens
  misc_feature 413: n = A,T,C or G
cctgggcttgaaatttgctgagctggtgtataccggtttctggcacagccctgagtgtgaatttgtccgccactgcatcgccaagtcccaggagcgagtggaagggaaagtgcaggtgtccgtcctcaagggccaggtgtacatcctcggccgggagtccccactgtctctctacaatgaggagctggtgagcatgaacgtgcagggtgattatgagccaactgatgccaccgggttcatcaacatcaattccctcaggctgaaggaatatcatcgtctccagagcaaggtcactgccaaatagacccgtgtacaatgaggagctggggcctcctcaatttgcagatcccccaagtacaggcgctaattgttgtgataatttgtaattgtgacttgttctccccggctggcancgtaatggggctgccaggccccagctttgttccctggtccccctgaagcctgcaaacgtt

SEQ ID NO: 336 - DNA, 232 bp, Homo sapiens
  misc_feature 1, 5, 61, 75, 146, 183, 187, 212, 226: n = A,T,C or G
naggnaaattattaaactcccttcatagactcacccatctcagccctcaaaaaataaaggngctccttgacaganaaaaaagcccctactacatgttaaacagggacagaactcttcagtatgtggcagaatcctgcacagtctgngctcaagtaaatgctagtaaagccaaaatcggggcangggnacgaatacccggacatccaccaagnacccattggaaaantaactt

SEQ ID NO: 337 - DNA, 260 bp, Homo sapiens
  misc_feature 1, 163, 219, 245, 257, 260: n = A,T,C or G
ngtctgctggtcccccaagatgaaatgagggaggtggaggtcccagaattcctggtgctggatttgtagactgctgcaacatgaatggatcacccattgtgtgtcctgtatcattgtcaggattccattctgggtagatttcaagaagaagctggcatcgacnactgtgacttgctccattgatatgttgactccactccttattagaatgaactggcnaatcacatatagagcacagatggggntaacccttcggnaan

SEQ ID NO: 338 - DNA, 387 bp, Homo sapiens
  misc_feature 4, 65, 131, 281, 312, 361, 366: n = A,T,C or G
ttgnccttatgactacaacggcccacgagaaaaatatggaatcgttgattacatgatcgagcagnccgggcctccctccaaggagattctgaccctgaagcaggtccaggagttcctgaaggatggagacnatgtcatcatcatcggggtctttaagggggagagtgacccagcctaccagcaataccaggatgccgctaacaacctgagagaagattacaaatttcaccacactttcagcacagaaatagcaaagttcttgaaagtctcccaggggcagntggttgtaatgcagcctgagaaattccagtncaagtatgagccccggagccacatgatggacgtccagggctccacccangactnggccatcaaggacttcgtgct

SEQ ID NO: 339 - DNA, 525 bp, Homo sapiens
ccaacagtgttgcaaacaggaacccgaggttttcacttcactgttgatgggaacaagagggcatctgctaaagtttcagattccatttctgctcagtatccagtagtggatcatgaatttgatgcagtggtggtaggcgctggaggggcaggcttgcgagctgcatttggcctttctgaggcagggtttaatacagcatgtgttaccaagctgtttcctaccaggtcacacactgttgcagcgcagggaggaatcaatgctgctctggggaacatggaggaggacaactggaggtggcatttctacgacaccgtgaagggctccgactggctgggggaccaggatgccatccactacatgacggagcaggcccccgccgccgtggtcgagctagaaaattatggcatgccgttcagcagaactgaagatgggaagatttatcagcgtgcatttggtggacagagcctcaagtttggaaagggcgggcaggcccatcggtgctgctgtgtggctgatccggactgg

SEQ ID NO: 340 - DNA, 220 bp, Homo sapiens
  misc_feature 1, 15, 81, 92, 169, 202: n = A,T,C or G
naaatggaagactgntctaaaatcacttttttccctaatccaatttttagagtggctagtagtttcttcatttgaaattgnaagcatccggncagtaagaatgcccatccagttttctatatttcatagtcaaagccttgaaagcatctacaaatctctttttttaggntttggccatagcatcagttgatccttactaagnttttcatgggagacttcc

SEQ ID NO: 341 - DNA, 49 bp, Homo sapiens
  misc_feature 9, 31: n = A,T,C or G
gtaccgagnctcgggatccactagtaacggncgccagtgtgctggaatt

SEQ ID NO: 342 - DNA, 300 bp, Homo sapiens
  misc_feature 9, 16, 18, 34, 80, 95, 110, 132, 137, 155, 161, 166, 194,209, 243, 250, 264, 297: n = A,T,C or G
aagcatatngaagaananaacttgattgacgaanactttcaaaatctaaaactgcggtcgacaggcttcaccaatcttgnagcagaagggagcgnatttcctaaggtcangataacggcctccagagacagncagangcaaaatccctattcaanacacancagcntgccccgccctgactattagaatcatangaatgtggaacccgncatggcccccaaccaatgtacaaagctattattnagagtgnttagaaagactganggagaagtgagccccagggaaagatctggcccnccg

SEQ ID NO: 343 - DNA, 572 bp, Homo sapiens
  misc_feature 1, 564, 567: n = A,T,C or G
naggtccaagcctcagcctttggtccagtgcaacccttgcctcgcttgtcaacagtgaaaaattagtttggttagaagaaccatctggaaacacaccagcttctgctaccttcatgctcattgttaaaaaaagattaaccagtgtgaacattctgatctgttaattccagggactgttttctttccaatggactgtttgttggtagaataacccccaaaagctcaaagctaaaatgcatcatcagtcctagtcggcagttccttaagaatggactggcggcgtggttgagctgatatggaaaagctgcaccttcctgcagaagatcaactgacctgctatcccaccccaaatttcagcctgaggtatatttcagtgaaggcaggtagctgtgcttctcagagcagagaagcagttttaagagcaaaaaggtagaggaaatctagaaaagaaccgtcttgatacagatttatcccatggtgtgaagggagggcaaagaacccagtggccttcgcttatccagcaatttctgtcactgtggtgaccaacttctgcccgttccatanggncttga

SEQ ID NO: 344 - DNA, 309 bp, Homo sapiens
  misc_feature 158, 190, 209, 224, 241, 242, 304: n = A,T,C or G
ccttctagttccacaccatcttcttgagggcttccttcagtattttcattcttaattttctttttatttttcttttctgcctctgctttcatttctatggttattcgtggaatgactctttgaccacgcggagaaggcaaaacttcagccatttgtgnttttttccccttggccttcccccctttcccangaagtccgacttgttcatnttgtttttccttggnttcaacagcctccaatnnttcaataaatgtagccaagtcttctttccacaaatctgatggactctttctttttaatgtgnccagc

SEQ ID NO: 345 - DNA, 105 bp, Homo sapiens
  misc_feature 24, 31, 70, 78, 79: n = A,T,C or G
caagcttgagtattctatagggtnacctaantagctgggcgtaatcatggccatacctgttccctgtganaaattgtnntccgctcacaattccacacaacatac

SEQ ID NO: 346 - DNA, 71 bp, Homo sapiens
  misc_feature 9, 23, 24, 27, 35, 57, 59, 65: n = A,T,C or G
actgcaganatccatcacactgnnggncgctcgancatgcatctagagggcccaatncnccctanagtgag

SEQ ID NO: 347 - DNA, 217 bp, Homo sapiens
  misc_feature 177, 185, 213: n = A,T,C or G
aaaatgttttatttcatagctcataaaaaagtatgtatgtacaagactcaagtaaatagaaaggcagctttcaatcacaaatcagtttttcagattttcctgtggaagcatatttaatgcacacatttgaatgttacacataaataattttaacgatggagtccaagttctggattntacattangatctgcatatataagacacttgtggtnaaat

SEQ ID NO: 348 - DNA, 373 bp, Homo sapiens
  misc_feature 307: n = A,T,C or G
ctggcctttttacccgcgtcagtgaattctaagactagggggttgcatcgaccccccggtgtggcaccctggacgccactggagaccgaggaatcataacaggggccctgatccttaggggtgtttcctcgcttaagggaaattaggtcccataatgatgatggcttccagtatgcctgtccagtggtctcacatccccatttgccacagtagccctctcccggccctccacaccctattggtacagtatgaccggggcaaacatagaagtcatacagtcttgtcctttttcttccccccggagagnggcaaccatctccaatatcgggttctgggtcatcccaatggtctccaactaaatcacacaagtcaa

SEQ ID NO: 349 - DNA, 445 bp, Homo sapiens
  misc_feature 8, 9, 19, 24, 28, 38, 44, 45, 49, 52, 53, 54, 56, 58, 78,80, 81, 96, 114, 129, 147, 150, 173, 176, 182, 199, 203,208, 212, 217, 225, 229, 238, 247, 260, 267, 270, 285, 294,295, 297, 305, 308, 310, 317, 332, 354, 365, 382, 383, 395: n = A,T,C or G
  misc_feature 404, 410, 430, 434: n = A,T,C or G
cggtgagnngggcgccggnggagncacnttggcacctnaggaanncccnctnnncngnttgcctcctcctaccctccncnngttttttacccggtntgagtacaacaggggcgntgaatactttttctnccgaaggaagattatttnaanaggaatatgccattgaggctatnaancttggntctacagccattggganccanacatnacanggtgngagcctanctgnggagaaaanaattacttncccactgatggancccagcnccnttgagaaaattgtanagattgatnntnacataggntgngncatgagngggctaattgctgangctaagactttaattgataaanccagagtgganacacagaaccactggtnnacctacaatganacaatgacngtgganagtgagacccaagctgtgtncaanctggctttgca

SEQ ID NO: 350 - DNA, 488 bp, Homo sapiens
cgcaagatggcgccgcagaaagacaggaagcccaagaggtcaacctggaggtttaatttggaccttactcatccagtagaagatggaatttttgattctggaaattttgagcaatttctacgggagaaggttaaagtcaatggcaaaactggaaatctcgggaatgttgttcacattgaacgcttcaagaataaaatcacagttgtttctgagaaacagttctctaaaaggtatttgaaataccttaccaagaaataccttaagaagaacaatcttcgtgattggcttcgagtggttgcatctgacaaggagacctacgaacttcgttacttccagattagtcaagatgaagatgaatcagagtcggaggactaggcaaaggctccccttacagggctttgcttattaataaaataaatgaagtatacatgagaaataccaagaaattggcttttagtttatcagtgaataaaaaatattatactctt

SEQ ID NO: 351 - DNA, 392 bp, Homo sapiens
  misc_feature 20: n = A,T,C or G
cgctccaagcccagccctcntccatggcatgccccctggatcaggccattggcctcctcgtggccatcttccacaagtactccggcagggagggtgacaagcacaccctgagcaagaaggagctgaaggagctgatccagaaggagctcaccattggctcgaagctgcaggatgctgaaattgcaaggctgatggaagacttggaccggaacaaggaccaggaggtgaacttccaggagtatgtcaccttcctgggggccttggctttgatctacaatgaagccctcaagggctgaaaataaatagggaagatggagacaccctctgggggtcctctctgagtcaaatccagtggtgggtaattgtacaataaattttttttggtcaaattt

SEQ ID NO: 352 - DNA, 1340 bp, Homo sapiens
ggcggcctgcattgcagcggggcactgggctgcaatgggcctaggccggagtttccaagccgccaggactctgctccccccgccggcctctatcgcctgcagggtccacgcggggcctgtccggcagcagagcactgggccttccgagcccggtgcgttccaaccgccgccgaaaccggtcatcgtggacaagcaccgccccgtggaaccggaacgcaggttcttgagtcctgaattcattcctcgaaggggaagaacagatcctctgaaatttcaaatagaaagaaaagatatgttagaaaggagaaaagtactccacattccagagttctatgttggaagtattcttcgtgttactacagctgacccatatgccagtggaaaaatcagccagtttctggggatttgcattcagagatcaggaagaggacttggagctactttcatccttaggaatgttatcgaaggacaaggtgtcgagatttgctttgaactttataatcctcgggtccaggagattcaggtggtcaaattagagaaacggctggatgatagcttgctatacttacgagatgcccttcctgaatatagcacttttgatgtgaatatgaagccagtagtacaagagcctaaccaaaaagttcctgttaatgagctgaaagtaaaaatgaagcctaagccctggtctaaacgctgggaacgtccaaattttaatattaaaggaatcagatttgatctttgtttaactgaacagcaaatgaaagaagctcagaagtggaatcagccatggcttgaatttgatatgatgagggaatatgatacttcaaaaattgaagctgcaatatggaaggaaattgaagcgtcgaaaaggtcttgattctgagaatgaatttggttagttgcagaagatacattggctctaagaggatatattttgagaccaatttaatttcatttataagaacatagtaattaagtgaactaagcattcattgttttattaatactttttttctaaaataaaacttgtacaccagtttactactctaaaaagagaattacacatgccaaatggaccaatgtccatttgcttattggaggcaaagctacaatagaagtcaaagcatcaccagaatggtctttaatgagcatggaacctgagcaaagggaataggtgggatgaatttttttttaattgtgaaacaattcataagcacaatatgatttacagaataataaacattcatgtacccactatcaggttaagaaatagaacatttattaatatgtaggaatgttaagaaataaaacatttaataagaaaaaaaaaaaaaaaaaaa

SEQ ID NO: 353 - DNA, 1325 bp, Homo sapiens
gtctgagggggcttgtaggtggctctggctgaaacaggcgcctgcgagagtctgtaggagggaaaccgccatggacgatcagggttgccctcggtgtaagaccaccaaatatcggaacccctccttgaagctgatggtgaatgtgtgcggacacactctctgtgaaagttgtgtagatttactgtttgtgagaggagctggaaactgccctgagtgtggtactccactcagaaagagcaacttcagggtacaactctttgaagatcccactgttgacaaggaggttgagatcaggaaaaaagtgctaaagatatacaataaaagggaagaagattttcctagtctaagagaatacaatgatttcttggaagaagtggaagaaattgttttcaacttgaccaacaatgtggatttggacaacaccaaaaagaaaatggagatataccaaaaggaaaacaaagatgttattcagaaaaataaattaaagctgactcgagaacaggaagaactggaagaagctttagaagtggaacgacaggaaaatgaacaaagaagattatttatacaaaaagaagaacaactgcagcagattctaaaaaggaagaataagcaggcttttttagatgagctggagagttctgatctccctgttgctctgcttttggctcagcataaagatagatctacccaattagaaatgcaacttgagaaacccaaacctgtaaaaccagtgacgttttccacaggcatcaaaatgggtcaacatatttcactggcacctattcacaagcttgaagaagctctgtatgaataccagccactgcagatagagacatatggaccacatgttcctgagcttgagatgctaggaagacttgggtatttaaaccatgtcagagctgcctcaccacaggaccttgctggaggctatacttcttctcttgcttgtcacagagcactacaggatgcattcagtgggcttttctggcagcccagttaaccatttataagatttggaccttggagctgaaccagggagctagcaaaagtaaagcagacttataaaattatagctatgtgcagctgcacaacacagtccttccactagcagctgtgttaaagtatttataaggagaaaatttcagaactaagttgagtaatataggggatatatatttgtgaaaaataatttttacttatatttttcagaggatttgacacgataagcctmatctgatggaagagaggaataaataattcacctatatgtgtttgaggttgtgacagacttataaaatctttttaaaaaataaagctataattta

SEQ ID NO: 354 - DNA, 846 bp, Homo sapiens
caccgccaccagcgcgggcgcgggccaaggccctgcaggagcagccaaagatgtaacagaagaatccgtaacagaagatgacaagaggagaaactatggaggagtatatgttggcctaccatctgaagctgtcaatatggtgtccagtcaaacaaagacggttcggaaaaattagaagaaaataacatcatgactcaagaatcaagagcttgctcatcagtttggaaggaatttggctccgtgggacgttgtaatgtgcacagacatttccaaggaaattctaaacagtcacccttcccttttgcattcccccaaatcttaagtgtatacataaaaccctgggtacatattgttgtggtaatagaagggaattggttaaacagtacacttgtttatggaactttctgtggccacctacgaaagacaagttaacaaactgtcatggaggctgttgttgcccagccagggccgctgcattttgacaacatttccaccctggccactcagcacatttcatggaggtcatgtcttttcactgatacttttttgatagtttttatataacaaaatccttattctatttataacttaagatgataaggcactataaattaatgacctaaaataatatatttgtctgttatcttttgctatttctacttcactttaatttttagctgtaaaattggtaaatggattcttacaactatctctttccatttcttactatttggttttcaaatttcatttaaatgtcagaatttccttttttaggaacaatgtgtatttcattgcactatttaaaaataaactcaaatttgcatgccataaaaaaaaaaaaaaaaa

SEQ ID NO: 355 - DNA, 1075 bp, Homo sapiens
  misc_feature 442: n = A,T,C or G
catgaatcttgatagacatctataacgttattattttcagtggtgtgcagcatttttgcttcatgagtatgacctaggtatagagatctgataacttgaattcagaatattaagaaaatgaagtaactgattttctaaaaaaaaaaaatttctacattataactcacagcattgttccattgcaggttttgcaatgtttgggggtaaagacagtagaaatattattcagtaaacaataatgtgtgaacttttaagatggataatagggcatggactgagtgctgctatcttgaaatgtgcacaggtacacttaccttttttttttttttaagtttttcccattcaggaaaacaacattgtgatctgtactacaggaaccaaatgtcatgcgtcatacatgtgggtataaagtacataaaatatatctaactattcataatgnggggggggtaatactgtctgtgaaataatgtaagaagcttttcacttaaaaaaaatgcattactttcacttaacactagacaccaggtcgaaaattttcaaggttatagtacttatttcaacaattcttagagatgctagctagtgttgaagctaaaaatagctttatttatgctgaattgtgatttttttatgccaaattttttttagttctaatcattgatgatagcttggaaataaataattatgccatggcatttgacagttcattattcctataagaattaaattgagtttagagagaatggtggtgttgagctgattattaacagttactgaaatcaaatatttatttgttacattattccatttgtattttaggtttccttttacattctttttatatgcattctgacattacatattttttaagactatggaaataatttaaagatttaagctctggtggatgattatctgctaagtaagtctgaaaatgtaatattttgataatactgtaatatacctgtcacacaaatgcttttctaatgttttaaccttgagtattgcagttgctgctttgtacagaggttactgcaataaaggaagtggattcattaaaaaaaaaaaaaaa

SEQ ID NO: 356 - DNA, 557 bp, Homo sapiens
aaacagcataccagcagtataaaatgtacaagaaatattagggaggcaagctggaattgacaatgagaagatttgaaaagggacctttgataagttgtcttgtctggtggttggtttgtttgttaaatctgtgttggtctgtgggtctcagaatctgcaagttctactttcagctgctcttaaataaactaacagacttactcttcaaataattagatagttacaaaaaaccccagcaaatccccatcacattaatggggggaaaacacttcttatttataaattcatgctatataaaatttcctataatagagtatgcaatgtctggcccatactagtactccaataatagcctttgttattgaagaaaaattacagagaatcacttgtttgcagactgcattcagaattgtcattaggtttctgtagtctaggcagaatcatcgtaaatgaatgaaataacatatcaagaaagagattctaaaacttttctattcaattgacatggattgattggstgatgctstagarrcattctcagrtcttaaggcaatcaa

SEQ ID NO: 357 - DNA, 1548 bp, Homo sapiens
ccagaagggcacactttcatctaatttggggtatcactgagctgaagacaaagagaagggggagaaaacctagcagaccaccatgtgctatgggaagtgtgcacgatgcatcggacattctctggtggggctcgccctcctgtgcatcgcggctaatattttgctttactttcccaatggggaaacaaagtatgcctccgaaaaccacctcagccgcttcgtgtggttcttttctggcatcgtaggaggtggcctgctgatgctcctgccagcatttgtcttcattgggctggaacaggatgactgctgtggctgctgtggccatgaaaactgtggcaaacgatgtgcgatgctttcttctgtattggctgctctcattggaattgcaggatctggctactgtgtcattgtggcagcccttggcttagcagaaggaccactatgtcttgattccctcggccagtggaactacacctttgccagcaccgagggccagtaccttctggatacctccacatggtccgagtgcactgaacccaagcacattgtggaatggaatgtatctctgttttctatcctcttggctcttggtggaattgaattcatcttgtgtcttattcaagtaataaatggagtgcttggaggcatatgtggcttttgctgctctcaccaacagcaatatgactgctaaaagaaccaacccaggacagagccacaatcttcctctatttcattgtaatttatatatttcacttgtattcatttgtaaaactttgtattagtgtaacatactccccacagtctacttttacaaacgcctgtaaagactggcatcttcacaggatgtcagtgtttaaatttagtaaacttcttttttgtttgtttatttgtttttgtttttttttaaggaatgaggaaacaaaccaccctctgggggtagtttacagactgagtgacagtactcagtatatctgagataaactctataatgttttggataaaaataacattccaatcactattgtatatatgtgcatgtattttttaaattaaagatgtctagttgctttttataagaccaagaaggagaaaatccgacaacctggaaagatttttgttttcactgcttgtatgatgtttcccattcatacacctataaatctctaacaagaggccctttgaactgccttgtgttctgtgagaaacaaatatttacttagagtggaaggactgattgagaatgttccaatccaaatgaatgcatcacaacttacaatgctgctcattgttgtgagtactatgagattcaaatttttctaacatatggaaagccttttgtcctccaaagatgagtactagggatcatgtgtttaaaaaaagaaaggctacgatgactgggcaagaagaaagatgggaaactgaataaagcagttgatcagcatcattggaacatggggacgagtgacggcaggaggaccacgaggaaataccctcaaaactaacttgtttaccacaaaataaagtattcactccaaaaaaaaaaaaaaa

SEQ ID NO: 358 - DNA, 1029 bp, Homo sapiens
cctcccctctgtatatagcatctcccccctcctagtgagcaggggcctgcaaggcatcactcccagcccctcgccttctagggcaccctcagcaaaggggcaggtggggacactccaagtggggcagctctccgtacatgcgccccacccccatgagccagttcagccctactgggggctgagcgggggcatcccctcctttgtacatagtctccatggatgtccctgccctgtagccaccagccccttgctgctctccctttaatgccatatggcccctgcctagggcacaggccccaacctgtgtgctggggtccccagcagcaaacactggaaagtctgttttttttttttctttcttcttccccaccccttaattttaactttgtggtaactgagtgcccccgcgtgcctgcgtgttgagtgtgtgggcggcagtgccgttccggaggcctggtccatctggagttttgaggggtgaggggaccagagcagtgggaccagcatggggatcagcttcccttccccacctggagccagggactgtccgggtagccagttttggtcctgccagctgcctccctgatccctccccactctcgccccttctctatgaacttaaatcaaaaaccacttccctccatctcctcctgctcctgcgtggagggggaatgtgtgctggctagggtggaggactgagcacctgagcctggggctggctccccggggtccccgactcagctggtggctgtggagctgagtcccctccccgtaacctctgcaaggccagcacccaccatcactacctgcacctgctgtggtcccaccctctggaggcctgggaacctggctgcagcctgggaaggctggagaggcagacggtgggacccaccagctctctccccatcccgcttcttccctgggggccaggccctacctgtgtggtggtgggtgggctgtcaagacgtgtcatgtacatttgtatcaaaaataaagaagtgaccatgaaaaaaaaaaaaaaaaaaaaaa

SEQ ID NO: 359 - DNA, 1754 bp, Homo sapiens
ctgaatgcatttatttcacaaatttgtttaagggctataaacaaaatttgtatcaacttgtttgtatatatttacaaaacagaaaattaagtcagcattaagtcaacatgagtagtcacagaatttttcccctttataaatggtacatattcaaggagacttcaaaaagtttgtggaaaaatggttaaaagataaaaaatataaactatatttttgaacattagctctatagcattcaagacacttttgtaagtgatgataccagctatttagtccatccctaaagaactgagagttctgggaatttatctacatcaatgcagtttctttatacattaacttgagaaaaatgtactgccctgaaaaatttttttaagattaggaaacaaaaagtcagaaggtgccaaaccaggactgtagggtggatgcctagtgatttcccatcaaaactcttgcaaaatggccttgtttgatgagagggatgagcaggaacattgttgtggtgaagaactctctggtctttctcggggatttttctgctgaagctttggctaagtttctcaaaacactcccatgataagcacgttaccattctttggccctacagaaagtcaacaagcaaaatgccttgagcattcaaaagctgttgccatgacctttgctctcaaccagtcctcttgtgctttaactgaactacttatcttggtaaccactgctttgttttgtcttcaggattgcgctggtaaagccatgtttcatctcctgttacaatttttcaatgaaaggcttcaagatcctgatcccatttatttaaaatttccattgaaagctctattcttgtctgtagctgatctgggtgcaatggttttggtacctatcaggtataaagtttgctgaacttttccagtcaaaattgtgtaaggtgaaccaactgagatgtctatggtgttggctgttgtttctgctgttaattgttggttttcttcaattacgccatgaactaacttttttctcacaaactgatgtggatgatctgccactgtgggcttcttcttcaacattaccttatgccttcttaaaacgagttatccatttgtaaactgatttctttggagcactgtccctatcaacttttcataaagcatcaattagttcaccattcttccacccaagtgtcaacatatatttgatgtttgttcttgcttcaattttagcagaattcgtgttgttctgatagagcctcttttcaaactgatgtcttattcttcttagtgcttcaaactagatccttattatataaatcttcaacttcttgatcaaataaatatgacaaatgatgttctctaagaaaaacacccttcaattttattccttccctgcatattttgagtaattatcttccaagacccatgtatcttttctcaacatctctgagagtacaattccttaatatgtatcttcggctgtaatcttatttccttcattgtggcaaagtgtttcagaaaagggttccttgaattaaaagtcggcgtatcctatttgactcctgctcctccggtatcacatacctacagccaaccatgccaagagcttccccattatctccgcatcggagagcctttcctcccgatatcctccagtttcagagaccgcacccggagacccattggcaggttcctggattcgcctcaattttggtcctgcctctctgcttcgcattttcaggcttggcctcacaagaaggacgatggcgc

SEQ ID NO: 360 - DNA, 679 bp, Homo sapiens
gtagctcggaagggtcaaaagagtccgcggtttcgccgcgtgagttgctttttgcggctggggaggtctacgcttctagagcttgagccagcggggcgaccctgcagtggcaggactcggcaccgcgccctccaccgccggttggtggcctgcgtgacagtttcctcccgtcgacatcgaaaggaagccggacgtgggcgggcagagagcttcatcgcagtaggaatggcagccccatctatgaaggaaagacaggtctgctggggggcccgggatgagtactggaagtgtttagatgagaacttagaggatgcttctcaatgcaagaagttaagaagctctttcgaatcaagttgtccccaacagtggataaaatattttgataaaagaagagactacttaaaattcaaagaaaaatttgaagcaggacaatttgagccttcagaaacaactgcaaaatcctaggctgttcataaagattgaaagtattctttctggacattgaaaaagctccactgactatggaacagtaatagtttgaatcatagtgaacatcaatacttgttccctatatacgacacttgataattaagatgatcaagaaccagaagatctgtgaagaaatgaaataaaatggtatttagtaagaaatctctattttaagaaaaaaaaaaaaaaa

SEQ ID NO: 361 - DNA, 1642 bp, Homo sapiens
cccaggacaagttgcctgtgtgtttatttagttttcttttgatctcccaccattttctcttagtttcaaaaagaggcggygatgcagagtcgtttaggcaatcaaccctcccacgtcccctggctcagctaatgctggtggtcattcgttgccatttctgcgaaaggggacggacggaaccgcccgcagtacccgcttgccaccggctggacgagggggagggacgacagcttttactgtcccaaatcctgagattaagacctcagggctaaatcttgcgtggcggtaaaaattatttggaagttctgtgcaaccgttccaatattccgcttttacgtgcacggaaatagcctaagtccagatgccagccagggaagccactccgggccccgctgactaagccctggactgatggtctggagtctttaggccgggtcaactatgactcttgacgttgactcattctccttaggcgagtgacttaatcgctcggcgtctcagcttttttatttatgaaccaaaggtgatgatacacttacctcacaagggtgtgcttcgtaatgactgtaaccggctttgaaaatgcatcggactctagaaatgattcataataagcaactgcgtgccttcctaaagatcaagtgcttctgcttttttttttagcaaagtttaaatttttttctgtttactttgtttgattatgatgtacaccagtgtagttttaaatgttcaggaccattttttttcctttacaactgcagctgccctcaatagaggctttaatgttcatgaaattattgttatgctcacaacaatcactggcaatcagaaatttgtccccacactggcatcctacatttcctttccctctaagatactgtgctgtcatttctcaagaccgtgttttttgcacagtttggctactaataacaacaaatagagatgaagaaatctagtagactcctaaggttctaatgaagaagacactgtctcattactatttcccatgcttttaaataatgttgacaccaggaaaaggagtgtatgcaggctgcctgtgcctgtctgcttatagtgttaatgaggtccagagctgtgtcatacctattattgagtacataatggatgcttgagttgactaacacataattgaggctgtatgagaactcaaagccattgcctgttcatatgttttggtttacctgaatatcagaagtgattaatgaaagcttttgtctagtgggcttagctctactaggttttaaagtagatagaattaacaggccaggcgcagtggcccacgcctgtaatcactgcccgcctcggcctgccaaagtgctgggattacaggcctgagccactgtgaacccttattttaattttacagtttgagagacaccaattcccattacctactcaggacattgcttaaaaacatgggatgtacgcaaacatgaccaaggaattttgaatattaaaagattggagcagaattggaatttaaaaaattattttattattctagttagttttttgtttactctctccttggtgatttttatgagactgaggcactacctactggctaaaaaggcmccttgatttttaaaagaaaatcaagaaaaagaaaaaaaaaaaaaaa

SEQ ID NO: 362 - DNA, 1389 bp, Homo sapiens
tgcaggcgaaagcaagaagatgacagggacggtttgctggctgaacgagagcaggaagaagccattgctcagttcccatatgtggaattcaccgggagagatagcatcacctgtctcacgtgccaggggacaggctacattccaacagagcaagtaaatgagttggtggctttgatcccacacagtgatcagagattgcgccctcagcgaactaagcaatatgtcctcctgtccatcctgctttgtctcctggcatctggtttggtggttttcttcctgtttccgcattcagtccttgtggatgatgacggcatcaaagtggtgaaagtcacatttaataagcaagactcccttgtaattctcaccatcatggccaccctgaaaatcaggaactccaacttctacacggtggcagtgaccagcctgtccagccagattcagtacatgaacacagtggtcagkacatatgtgactactaacgtcttccttattccacctcggagtgagcaactggtgaattttaccgggaaggccgagatgggaggaccgttttcctatgtgtacttcttctgcacggtacctgagatcctggtgcacaacatagtgatcttcatgcgaacttcagtgaagatttcatacattggcctcatgacccagagctccttggagacacatcactatgtggattgtggaggaaattccacagctatttaacaactgctattggttcttccacacagcgcctgtagaagagagcacagcatatgttcccaaggcctgagttctggacctacccccacgtggtgtaagcagaggaggaattggttcacttaactcccagcaaacatcctcctgccacttaggaggaaacacctccctatggtaccattatgtttctcagaaccagcagaatcagtgcctagcctgtgcccagcaaatagttggcactcaataaagatttgcagaatttaatacagatcttttcagctgttcttagggcattataaatggaaatcataacgtggttctaggttatcaaaccatggagtgatgtggagctaggattgtgagtgacctgcaggccattatcagtgcctcatctgtgcagaagtcgcagcagagagggaccatccaaatacctaagagaaaacagacctagtcaggatatgaatttgtttcagctgttcccaaaggcctgggagctttttgaaaagaaagaaaaaagtgtgttggcttttttttttttttagaaagttagaattgtttttaccaagagtctatgtggggcttgattcacccttcatccattggctggaacatggattggggatttgatagaaaaataaaccctgcttttgattcaaaaaaaaaaaaaaaaaaaaaaaaaaa

SEQ ID NO: 363 - DNA, 602 bp, Homo sapiens
attttcccagcatttgattctgtacgcaaacatttctgcaagcagggttttggcagttcagaattatgacgaagaacaacggagtaaagggaaatactcctcaaactagtgccaaaataaagccggaattttacattttagagcaatgcagtacctaccagactatttttctgtgagcattctaactgaaaaaccaaacctctttccagtgaaaatatttatgattttaattttatactgttttatttcacgttcagtgttatacggagttgatttgtgcagtcacaaatcatgacgttgccacgatgtatatcatttatgttgacaggaaacatagttccaggatctgagatcgaaaaggcaactttaattggcattagaatttttaaaaatgtgatttgatgtagatgctacttttatcttaaaacacaattaaaatgtcaaaagttacttaaaagtaccatacctcctaaatatggagcaaggtttctcaacctccgcaccattaactttgttgktgttgktgkttttgagaccctgtcacaaaaaaaaaaaagaagaagattctactttagcttccgggatttaaaaaaaaaaaaaaa

SEQ ID NO: 364 - DNA, 2692 bp, Homo sapiens
tttataaacttatagaatgtcaaactttgccttcaactgtttttatttctagtctcttccactttaaaacaaaatgaacactgcttgtcttcttccattgaccatttagtgttgagtactgtatgtgttttgttaattctataaaggtatctgttagatattaaaggtgagaattagggcaggttaatcaaaaatggggaaggggaaatggtaaccaaaaagtaaccccatggtaaggtttatatgagtatatgtgaatatagagctaggaaaaaaagcccccccaaatacctttttaacccctctgattggctattattactatatttattattatttattgaaaccttagggaagattgaagattcatcccatacttctatataccatgcttaaaaatcacgtcattctttaaacaaaaatactcaagatcatttatatttatttggagagaaaactgtcctaatttagaatttccctcaaatctgagggacttttaagaaatgctaacagatttttctggaggaaatttagacaaaacaatgtcatttagtagaatatttcagtatttaagtggaatttcagtatactgtactatcctttataagtcattaaaataatgtttcatcaaatggttaaatggaccactggtttcttagagaaatgtttttaggcttaattcattcaattgtcaagtacacttagtcttaatacactcaggtttgaacagattattctgaatattaaaatttaatccattcttaatattttaaaacttttgttaagaaaaactgccagtttgtgcttttgaaatgtctgttttgacatcatagtctagtaaaattttgacagtgcatatgtactgttactaaaagctttatatgaaattattaatgtgaagtttttcatttataattcaaggaaggatttcctgaaaacatttcaagggatttatgtctacatatttgtgtgtgtgtgtgtatatatatgtaatatgcatacacagatgcatatgtgtatatataatgaaatttatgttgctggtattttgcattttaaagtgatcaagattcattaggcaaactttggtttaagtaaacatatgttcaaaatcaaattaacagatacaggtttcatagagaacaaaggtgatcatttgaagggcatgctgtaatttcacacaattttccagttcaaaaatggagaatacttcgcctaaaatactgttaagtgggttaattgatacaagtttctgtggtggaaaatttatgcaggttttcacgaatccttttttttttttttttttttttgagacggagtctcgctctgttgccacgctggaatgcagtaacgtgatctcggctcactgcgacctccacctccccagttcaagcgattctcctgcctcagcctccctagtagctgggactacgggtgcacgccaccatgcccagctaatttttgtattttgagtagagacagggtttcaccgtgttggctaggatggtgtctatctcttgaccttgtgatccacccgcctcagcctcccagagtgctgggattacaggtgcgagccactgcgcctggctggttttcatgaatcttgatagacatctataacgttattattttcagtggtgtgcagcatttttgcttcatgagtatgacctaggtatagagatctgataacttgaattcagaatattaagaaaatgaagtaactgactttctaaaaaaaaaaaaaaaaaaaaatttctacattataactcacagcattgttccattgcaggttttgcaatgtttgggggtaaagacagtagaaatattattcagtaaacaataatgtgtgaacttttaagatggataatagggcatggactgagtgctgctatcttgaaatgtgcacaggtacacttacctttttttttttttttttaagtttttcccattcaggaaaacaacattgtgatctgtactacaggaaccaaatgtcatgcgtcatacatgtgggtataaagtacataaaatatatctaactattcataatgtggggtgggtaatactgtctgtgaaataatgtaagaagcttttcacttaaaaaaaatgcattactttcacttaacactagacaccaggtcgaaaattttcaaggttatagtacttatttcaacaattcttagagatgctagctagtgttgaagctaaaaatagctttatttatgctgaattgtgatttttttatgccaaaatttttttagttctaatcattgatgatagcttggaaataaataattatgccatggcatttgacagttcattattcctataagaattaaattgagtttagagagaatggtggtgttgagctgattattaacagttactgaaatcaaatatttatttgttacattattccatttgtattttaggtttccttttacattctttttatatgcattctgacattacatattttttaagactatggaaataatttaaagatttaagctctggtggatgattatctgctaagtaagtctgaaaatgtaatattttgataatactgtaatatacctgtcacacaaatgcttttctaatgttttaaccttgagtattgcagttgctgctttgtacagaggttactgcaataaaggaagtggattcattaaacctaaaaaaaaaaaaaaaaaaa

SEQ ID NO: 365 - DNA, 1452 bp, Homo sapiens
tctagagtccgatgcattttcaaagccggttacagtcattacgaagcacacccttgtgaggtaagtgtatcatcacctttggttcataaataaaaaagctgagacgccgagcgattaagtcactcgcctaaggagaatgagtcaacgtcaagagtcatagttgacccggcctaaagactccagaccatcagtccagggcttagtcagcggggcccggcgtggcttccctggctggcatctggacttaggctatttccgtgcacgtaaaacggaatattggaacggttgcacagaacttccaaataatttttaccgccacgcaagatttagccctgaggtcttaatctcaggatttgggacagtaaaagctgtcgtccctccccctcgtccagccggtggcaagcgggtactgcggcggttccgtccgtcccctttcgcagaaatggcaacgaatgaccaccagcattagctgagccaggggacgtgggagggttgattgcctaaacgactctgcatcgccgcctctttttgaaactaagagaaaatggtgggagatcaaaagaaaactaaataaacacacaggcaacttgtcctgggacctcaactaagcaaatgaagccttattgtgtgtgctgagcctgcagttcccaaccttccggggaagatgggaggacagggcgacaaagggcacagtaggcttgcctggcagtaagtgtgaccgcagctatccaggcggaagagcagaggactgaaaccaccctccagcaagcgagtgtccgccgcgttgagaaccgcgcaccctacccatcggccacgtgaccagtcctttttaaaaaaaatttctttaccttaaaaaaaaaaaaaaaaaaaaaaggtgggggagagactccacttcccagaagcctctcgttactcacgcagccgcagtcttgcgcaggtgccgccagggccaaacggacatatccgtcacgtggccagaagctggccaatccggtttgaatctcatttttttcctcttacccccccttctggagcggttgtgcgatcagatcgatctaagatggcgactgtcgaaccggtgagtattgcctttggcccccacccccacgggtccccgcgctccgtcttccttctgactgggggactccgcgggacggcgttcccggcgcgcactgtaccccttgccgccccttccccctcatgttggacctgacctcccgcggacaagtggggacgtcccggaggatggccgaggcggcgtgtagcgcacactttctggtgggggcccgagaactgggggagcggtgtgggggaggggcggcgtggcgcctcctgcggaaccgcgaggtgtctacagggtggagggtagctggggttctgggctgggtatgcgaggatggtgtcttcatgataggaaggcgcagggccggctcccagcgagtactgggatcc

SEQ ID NO: 366 - DNA, 4108 bp, Homo sapiens
gcggaatagtgggttttgctgcaaccggtttattttccttctgttttcacccattctggcacaatctggcgccatcgtccttcttgtgaggccaagcctgaaaatgcgaagcagagaggcaggaccaaaattgaggcgaatccaggaacctgccaatgggtctccgggtgcggtctctgaaactggaggatatcgggaggaaaggctctccgatgcggagataatggggaagctcttggcatggttggctgtaggtatgtgataccggaggagcaggagtcaaataggatacgccgacttttaattcaaggaacccttttctgaaacactttgccacaatgaaggaaataagattacagccgaagatacatattaaggatgaagttaaaggaagtagatcgtacagccatgcaggcatggagccctgcccagaatcaccccatttacctagcaacaggaacatctgctcagcaattggatgcaacatttagtacgaatgcttcccttgagatatttgaattagacctctctgatccatccttggatatgaaatcttgtgccacattctcctcttctcacaggtaccacaagttgatttgggggccttataaaatggattccaaaggagatgtctctggagttctgattgcaggtggtgaaaatggaaatattattctctatgatccttctaaaattatagctggagacaaggaagttgtgattgcccagaatgacaagcatactggcccagtgagagccttggatgtgaacattttccagactaatctggtagcttctggtgctaatgaatctgaaatctacatatgggatctaaataattttgcaaccccaatgacaccaggagccaaaacacagccgccagaagatatcagctgcattgcatggaacagacaagttcagcatattttagcatcagccagtcccagtggccgggccactgtatgggatcttaggaaaaatgagccaatcatcaaagtcagtgaccatagtaacagaatgcattgttctgggttggcatggcatcctgatgttgctactcagatggtccttgcctccgaggatgaccggttaccagtgatccagatgtgggatcttcgatttgcttcctctccacttcgtgtcctggaaaaccatgccagggggattttggcaattgcttggagcatggcagatcctgaattgttactgagctgtggaaaagatgctaagattctctgctccaatccaaacacaggagaggtgttatatgaacttcccaccaacacacagtggtgcttcgatattcagtggtgtccccgaaatcctgctgtcttatcagctgcttcgtttgatgggcgtatcagtgtttattctatcatgggaggaagcacagatggtttaagacagaaacaagttgacaagctttcatcatcttttgggaatcttgatccctttggcacaggacagccccttcctccgttacaaattccacagcagactgctcagcatagtatagtgctgcctctgaagaagccgcccaagtggattcgaaggcctgttggtgcttctttttcatttggaggcaaactggttacgtttgagaatgtcagaatgccttctcatcagggagctgagcagcagcagcagcagcaccatgtgttcattagtcaggttgtaacagaaaaggagttcctcagccgatcagaccaacttcagcaggctgtgcagtcacaaggatttatcaattattgccaaaaaaaaattgatgcttctcagactgaatttgagaaaaatgtgtggtcctttttgaaggtaaactttgaggatgattctcgtggaaaataccttgaacttctaggatacagaaaagaagatctaggaaagaagattgctttggccttgaacaaagtggatggagccaatgtggctcttaaagactctgaccaagtagcacagagtgatggggaggagagccctgctgctgaagagcagctcttgggagagcacattaaagaggaaaaagaagaatctgaatttctaccctcatctggaggaacatttaatatctctgtcagtggggacattgatggtttaattactcaggctttgctgacgggcaattttgagagtgctgttgacctttgtttacatgataaccgcatggccgatgccattatattggccatagcaggtggacaagaactcttggctcgaacccagaaaaaatacttcgcaaaatcccaaagcaaaattaccaggctcatcactgcagtggtgatgaagaactggaaagagattgttgagtcttgtgatcttaaaaattggagagaggctttagctgcagtattgacttatgcaaagccggatgaattttcagccctttgtgatcttttgggaaccaggcttgaaaatgaaggagatagcctcctgcagactcaagcatgtctctgctatatttgtgcagggaatgtagagaaattagttgcatgttggactaaagctcaagatggaagccaccctttgtcacttcaggatctgattgagaaagttgtcatcctgcgaaaagctgtgcaactcactcaagccatggacactagtactgtaggagttctcttggctgcgaagatgagtcagtatgccaatttgttggcagctcagggcagtattgctgcagccttggcttttcttcctgacaacaccaaccagccaaatatcatgcagcttcgtgacagactttgtagagcacaaggagagcctgtagcaggacatgaatcacctaaaattccgtacgagaaacagcagctccccaagggcaggcctggaccagttgctggccaccaccagatgccaagagttcaaactcaacaatattatccccatggagaaaatcctccacctccgggtttcataatgcatggaaatgttaatccaaatgctgctggtcagcttcccacatctccaggtcatatgcacacccaggtaccaccttatccacagccacagccttatcaaccagcccagccgtatcccttcggaacaggggggtcagcaatgtatcgacctcagcagcctgttgctcctcctacttcaaacgcttaccctaacaccccttacatatcttctgcttcttcctatactgggcagtctcagctgtacgcagcacagcaccaggcctcttcacctacctccagccctgctacttctttccctcctcccccttcctctggagcatccttccagcatggcggaccaggagctccaccatcatcttcagcttatgcactgcctcctggaacaacaggtacactgcctgctgccagtgagctgcctgcgtcccaaagaacaggtcctcagaatggttggaatgaccctccagctttgaacagagtacccaaaaagaagaagatgcctgaaaacttcatgcctcctgttcccatcacatcaccaatcatgaacccgttgggtgacccccagtcacaaatgctgcagcaacagccttcagctccagtaccactgtcaagccagtcttcattcccacagccacatcttccaggtggccagcccttccatggcgtacagcaacctcttggtcaaacaggcatgccaccatctttttcaaagcccaatattgaaggtgccccaggggctcctattggaaataccttccagcatgtgcagtctttgccaacaaaaaaaattaccaagaaacctattccagatgagcacctcattctaaagaccacatttgaggatcttattcagcgctgcctttcttcagcaacagaccctcaaaccaagaggaagctagatgatgccagcaaacgtttggagtttctgtatgataaacttagggaacagacactttcaccaacaatcaccagtggtttacacaacattgcaaggagcattgaaactcgaaactactcagaaggattgaccatgcatacccacatagttagcaccagcaacttcagtgagacctctgctttcatgccagttctcaaagttgttctcacccaggccaataagctgggtgtctaaaaggacagcttctcttccactcaatattgccatttttccaaagaaacatgttaaaaaaaaaaaaaaa

SEQ ID NO: 367 - DNA, 1281 bp, Homo sapiens
cgcgcttccgagagtctgtaggagggaaaccgccatggacgatcagggttgccctcggtgtaagaccaccaaatatcggaacccctccttgaagctgatggtgaatgtgtgcggacacactctctgtgaaagttgtgtagatttactgtttgtgagaggagctggaaactgccctgagtgtggtactccactcagaaagagcaacttcagggtacaactctttgaagatcccactgttgacaaggaggttgagatcaggaaaaaagtgctaaagatatacaataaaagggaagaagattttcctagtctaagagaatacaatgatttcttggaagaagtggaagaaattgttttcaacttgaccaacaatgtggatttggacaacaccaaaaagaaaatggagatataccaaaaggaaaacaaagatgttattcagaaaaataaattaaagctgactcgagaacaggaagaactggaagaagctttagaagtggaacgacaggaaaatgaacaaagaagattatttatacaaaaagaagaacaactgcagcagattctaaaaaggaagaataagcaggcttttttagatgagctggagagttctgatctccctgttgctctgcttttggctcagcataaagatagatctacccaattagaaatgcaacttgagaaacccaaacctgtaaaaccagtgacgttttccacaggcatcaaaatgggtcaacatatttcactggcacctattcacaagcttgaagaagctctgtatgaataccagccactgcagatagagacatatggaccacatgttcctgagcttgagatgctaggaagacttgggtatttaaaccatgtcagagctgcctcaccacaggaccttgctggaggctatacttcttctcttgcttgtcacagagcactacaggatgcattcagtgggcttttctggcagcccagttaaccatttataagatttggaccttggagctgaaccagggagctagcaaaagtaaagcagacttataaaattatagctatgtgcagctgcacaacacagtccttccactagcagctgtgttaaagtatttataaggagaaaatttcagaactaagttgagtaatataggggatatatatttgtgaaaaataatttttacttatatttttcagaggatttgacacgataagcctcatctgatggaagagaggaataaataattcacctatatgtgtttgaggttgtgacagacttataaaatcttttaaaaaataaagctg

SEQ ID NO: 368 - DNA, 1188 bp, Homo sapiens
tcgagatccattgtgctctaaaggctcgccctcctgtgcatcgcggctaatttggggtatcactgagctgaagacaaagagaagggggagaaaacctagcagaccaccatgtgctatgggaagtgtgcacgatgcatcggacattctctggtggggctcgccctcctgtgcatcgcggctaatattttgctttactttcccaatggggaaacaaagtatgcctccgaaaaccacctcagccgcttcgtgtggttcttttctggcatcgtaggaggtggcctgctgatgctcctgccagcatttgtcttcattgggctggaacaggatgactgctgtggctgctgtggccatgaaaactgtggcaaacgatgtgcgatgctttcttctgtattggctgctctcattggaattgcaggatctggctactgtgtcattgtggcagcccttggcttagcagaaggaccactatgtcttgattccctcggccagtggaactacacctttgccagcaccgagggccagtaccttctggatacctccacatggtccgagtgcactgaacccaagcacattgtggaatggaatgtatctctgttttctatcctcttggctcttggtggaattgaattcatcttgtgtcttattcaagtaataaatggagtgcttggaggcatatgtggcttttgctgctctcaccaacagcaatatgactgctaaaagaaccaacccaggacagagccacaatcttcctctatttcattgtaatttatatatttcacttgtattcatttgtaaaactttgtattagtgtaacatactccccacagtctacttttacaaacgcctgtaaagactggcatcttcacaggatgtcagtgtttaaatttagtaaacttcttttttgtttgtttatttgtgtaacatactccccacagtctacttttacaaacgcctgtaaagactggcatcttcacaggatgtcagtgtttaaatttagtaaacttcttttttgtttgtttatttgtttttgtttttttttaaggaatgaggaaacaaaccaccctctgggggtagtttacagactgagtgacagtactcagtatatctgagataaactctataatgttttggataaaaataacattccatggcacatatatacaatagtgattggctttagagcacaat

SEQ ID NO: 369 - DNA, 2895 bp, Homo sapiens
ggcaccatgagctggcggaaaggctggttgagtgccaatatgagctcactgaccggctggccttctacctctgtggacgcaagccggatcacaagaatgggcattacatcatcccacagatggctgacagccttgacttatccgaattggccaaagctgctaagaagaagctgcaggcgctcagcaaccggctttttgaggaactcgccatggacgtgtatgacgaggtggatcgaagagaaaatgatgcagtgtggctggctacccaaaaccacagcactctggtgacagagcgcagtgccgtgcccttcctgcctgttaacccggaatactcagccacgcggaatcaggggcgacaaaagctggcccgctttaatgcccgagagtttgccaccttgatcatcgacattctcagtgaggccaagcggagacagcagggcaagagcctgagcagccccacagacaacctcgagctgtctctgcggagccagagtgacctcgacgaccaacacgactacgacagcgtggcctctgacgaggacacagaccaggagcccctgcgcagcaccggcgccactcggagcaaccgggcccggagcatggactcctcggacttgtctgacggggctgtgacgctgcaggagtacctggagctgaagaaggccctggctacatcggaggcaaaggtgcagcagctcatgaaggtcaacagtagcctgagcgacgagctccggaggctgcagcgagagatccacaagctgcaggcggagaacctgcagctccggcagcctccagggccggtgcccacacctccactccccagtgaacgggcggaacacacacccatggcgccaggcgggagcacacaccgcagggatcgccaggccttttccatgtaacctggctctgccctgaagccctttgggggcccccctggggacgagctcactacgcggctgcagccttaccacagcactgagctagaggacgacgccatctattcagtgcacgtccctgctggcctttaccggatccggaaaggggtgtctgcctcagctgtgcccttcactccctcctccccgctgctgtcctgctcccaggagggaagccgccacacgagcaagctttcccgccacggcagtggagccgacagtgactatgagaacacgcaaagtggggacccactgctggggctggaagggaagaggtttctagagctgggcaaagaggaagacttccacccagagctggaaagcctggatggagacctagatcctgggcttcccagcacagaggatgtcatcttgaagacagagcaggtcaccaagaacattcaggaactgttgcgggcagcccaggagttcaagcatgacagcttcgtgccctgctcagagaagatccatttggctgtgaccgagatggcctccctcttcccaaagaggccagccctggagccagtgcggagctcactgcggctgctcaacgccagcgcctaccggctgcagagtgagtgccggaagacagtgcccccagagcccggcgccccagtggacttccagctgctgactcagcaggtgatccagtgcgcctatgacatcgccaaggctgccaagcagctggtcaccatcaccacccgagagaagaagcagtgacctctctccccacaccctcacctgcaccctaggacctcactggccataggagctgggccactccagacattaatccccaccccaacagagccactggcacaagtgcccttagtgctgccacactccctggcagccaggtgccctggtgcccacccctgtcgagcccctaaggatggggaggttgggggggcaggagcttctgtcccccacattccatgcacctcccctctgtatatagcatctcccccctcctagtgagcaggggcctgcaaggcatcactcccagcccctcgccttctagggcaccctcagcaaaggggcaggtggggacactccaagtggggcagctctccgtacatgcgccccacccccatgagccagttcagccctactgggggctgagcgggggcatcccctcctttgtacatagtctccatggatgtccctgccctgtagccaccagccccttgctgctctccctttaatgccatatggcccctgcctagggcacaggccccaacctgtgtgctggggtccccagcagcaaacactggaaagtctgtttttttttttctttcttcttccccaccccttaattttaactttgtggtaactgagtgcccccgcgtgcctgcgtgttgagtgtgtgggcggcagtgccgttccggaggcctggtccatctggagttttgaggggtgaggggaccagagcagtgggaccagcatggggatcagcttcccttccccacctggagccagggactgtccgggtagccagttttggtcctgccagctgcctccctgatccctccccactctcgccccttctctatgaacttaaatcaaaaaccacttccctccatctcctcctgctcctgcgtggagggggaatgtgtgctggctagggtggaggactgagcacctgagcctggggctggctccccggggtccccgactcagctggtggctgtggagctgagtcccctccccgtaacctctgcaaggccagcacccatcatcactacctgcacctgctgtggtcccaccctctggaggcctgggaacctggctgcagcctgggaaggctggagaggcagacggtgggacccaccagctctctccccatcccgcttcttccctgggggccaggccctacctgtgtggtggtgggtgggctgtcaagacgtgtcatgtacatttgtatcaaaaataaagaagtgaccatgaaaaaaaaaaaaaaaaa

SEQ ID NO: 370 - DNA, 1322 bp, Homo sapiens
ggcggcctgcattgcagcggggcactgggctgcaatgggcctaggccggagtttccaagccgccaggactctgctccccccgccggcctctatcgcctgcagggtccacgcggggcctgtccggcagcagagcactgggccttccgagcccggtgcgttccaaccgccgccgaaaccggtcatcgtggacaagcaccgccccgtggaaccggaacgcaggttcttgagtcctgaattcattcctcgaaggggaagaacagatcctctgaaatttcaaatagaaagaaaagatatgttagaaaggagaaaagtactccacattccagagttctatgttggaagtattcttcgtgttactacagctgacccatatgccagtggaaaaatcagccagtttctggggatttgcattcagagatcaggaagaggacttggagctactttcatccttaggaatgttatcgaaggacaaggtgtcgagatttgctttgaactttataatcctcgggtccaggagattcaggtggtcaaattagagaaacggctggatgatagcttgctatacttacgagatgcccttcctgaatatagcacttttgatgtgaatatgaagccagtagtacaagagcctaaccaaaaagttcctgttaatgagctgaaagtaaaaatgaagcctaagccctggtctaaacgctgggaacgtccaaattttaatattaaaggaatcagatttgatctttgtttaactgaacagcaaatgaaagaagctcagaagtggaatcagccatggcttgaatttgatatgatgagggaatatgatacttcaaaaattgaagctgcaatatggaaggaaattgaagcgtcgaaaaggtcttgattctgagaatgaatttggttagttgcagaagatacattggctctaagaggatatattttgagaccaatttaatttcatttataagaacatagtaattaagtgaactaagcattcattgttttattaatactttttttctaaaataaaacttgtacaccagtttattactctaaaaagagaattacacatgccaaatggaccaatgtccatttgcttattggaggcaaagctacaatagaagtcagagcatcaccagaatggtctttaatgagcatggaacctgagcaaagggaataggtgggatgaattttttttttaattgtgaaacaattcataagcacaatatgatttacagaataataaacattcatgtacccactatcaggttaagaaatagaacatttattaatatgtaggaatgttaagaaataaaacatttaataag

SEQ ID NO: 371 - DNA, 544 bp, Homo sapiens
  misc_feature 529: n = A,T,C or G
aaagaattaacttacatgcaattgtgtgattattagttatcagcagtgttgtaaggaaaattattgtgttttttttatgatcattatcccactttaggtaaagaaaaatattggaatggaatagtgttgggaaacagacattaacaacctagggtgcctgcactcaaatagccgatgttactgtccctagattagagacttgattaagggcttgtttgtaccaaaagtggggaaacaatgccatgacctgtgttttagtttggctgcaccacagatcaaatctgcactgtgtctacatataggaaaggtcctggtgtgtgctaatgttcccaatgcaggacttgaggaagagctctgttatatgtttccatttctctttatcaaagataaccaaaccttatggcccttataacaatggaggcactggctgcctcttaattttcaatcatggacctaaagaagtactctgaagggtctcaacaatgccaggtggggacagatatactcagagattatccaggtctgcctnccagcgagcctggag

SEQ ID NO: 372 - DNA, 367 bp, Homo sapiens
aaagttgaactaagattctatcttggacaaccagctatcaccaggctcggtaggtttgtcgcctctacctataaatcttcccactattttgctacatagacgggtgtgctcttttagctgttcttaggtagctcgtctggtttcgggggtcttagctttggttctccttgcaaagttatttctagttaattcattatgcagaaggtataggggttagtccttgctatattatgcttggttataatttttcatctttcccttgcggtactatatctattgcgccaggtttcaatttctatcgcctatactttatttgggtaaatggtttggctaaggttgtctggtagtaaggtggagtgggtttggg

SEQ ID NO: 373 - DNA, 547 bp, Homo sapiens
ccaccaaacaattcgagcagctccaggcagccatacatacagaccttggggccttagaaaaatcagtcagtgccctagaaaagtctctgacctcgttgtctgaggtggtcctacagaaccggagaggattagatctgctgttcctaaaagaaggaggattatgtgctgccctaaaagaagaatgctgtttctatgcagaccacactggcgtagtaagggatagcatggctaagctaagagaaaggctaaaccagaggcaaaaattgttcgaatcaggacaagggtggtttgagggactgtttaacaggtccccatggttcacgaccctgatatccaccattatgggccctctgatagtacttttattaatcctactcctcggaccctgcattctcaaccgcttggtccagtttgtaaaagacagaatttcggtggtgcaggccctggttctgacccaacagtatcaccaactcaaatcaatagatccagaagaagtagaatcgcgtgaataaaagattttattcagtttccagaaagaggggggaat

SEQ ID NO: 374 - DNA, 532 bp, Homo sapiens
ccgggcaggtagccgcaatggctgaaaatggtgataatgaaaagatggctgccctggaggccaaaatctgtcatcaaattgagtattattttggcgacttcaatttgccacgggacaagtttctaaaggaacagataaaactggatgaaggctgggtacctttggagataatgataaaattcaacaggttgaaccgtctaacaacagactttaatgtaattgtggaagcattgagcaaatccaaggcagaactcatggaaatcagtgaagataaaactaaaatcagaaggtctccaagcaaacccctacctgaagtgactgatgagtataaaaatgatgtaaaaaacagatctgtttatattaaaggcttcccaactgatgcaactcttgatgacataaaagaatggttagaagataaaggtcaagtactaaatattcagatgagaagaacattgcataaagcatttaagggatcaatttttgttgtgtttgatagcattgaatctgctaagaaatttgtagagacccctgg

SEQ ID NO: 375 - DNA, 481 bp, Homo sapiens
  misc_feature 21, 113, 201: n = A,T,C or G
tagaaaagtctctgacctcgntgtctgaggtggtcctacagaaccggagaggattagatctgctgttcctaaaagaaggaggattatgtgctgccctaaaagaagaatgctgnttctatgcagaccacactggcgtagtaagggatagcatggctaagctaagagaaaggctaaaccagaggcaaaaattgttcgaatcangacaagggtggtttgagggactgtttaacaggtccccatggttcacgaccctgatatccaccattatgggccctctgatagtacttttattaatcctactcctcggaccctgcattctcaaccgcttggtccagtttgtaaaagacagaatttcggtggtgcaggccctggttctgacccaacagtatcaccaactcaaatcaatagatccagaagaagtagaatcgcgtgaataaaagattttattcagtttccagaaagaggggggaatgaaagaccc

SEQ ID NO: 376 - DNA, 471 bp, Homo sapiens
aaataaggcttggggtttttcccggtcttttggggaacttgaaactgaggtgggactttccagaaactgttgctagtttcgctttatctgagtaccatctgttcttggccctgagccggggcccaggtgctcgaccacagatatcctgtttggcccctgtcccagttttgttcagccttattctttaactaaacttccttgtgacttttgagaactcagctctggtactttttcatgccttgcaaaatggcgttactgcagctagcttgctaagccttatggtggggtctttcattcccccctctttctggaaactgaataaaatcttttattcacgcgattctacttcttctggatctattgatttgagttggtgatactgttgggtcagaaccagggcctgcaccaccgaaattctgtcttttacaaactggaccaagcggttgagaatgcagggtccgaggagtagga

SEQ ID NO: 377 - DNA, 475 bp, Homo sapiens
aaataaggcttggggtttttcccggtcttttggggaacttgaaactgaggtgggactttccagaaactgttgctagtttcgctttatctgagtaccatctgttcttggccctgagccggggcccaggtgctcgaccacagatatcctgtttggcccctgtcccagttttgttcagccttattctttaactaaacttccttgtgacttttgagaactcagctctggtactttttcatgccttgcaaaatggcgttactgcagctagcttgctaagccttatggtggggtctttcattcccccctctttctggaaactgaataaaatcttttattcacgcgattctacttcttctggatctattgatttgagttggtgatactgttgggtcagaaccagggcctgcaccaccgaaattctgtcttttacaaactggaccaagcggttgagaatgcagggtccgaggagtaggattaa

SEQ ID NO: 378 - DNA, 549 bp, Homo sapiens
  misc_feature 472: n = A,T,C or G
ccaggatggtcttgatctgacctcgcgatccgtctgcctcggcctcccaaagtgctgggattacaggcgtgagccaccgtgcccggccttgtatgtgggttttaagtgggccaatgtaataagcattctgtttcatacctggggtagtatgtggatataagtatcagcttaaaatagggcaagtaaataaatctgtgttcctatctggcggtatgtcattgccttctatctttggacctagaaatgagttggttcaaaccaggcagatatgcagacctgtttgtatctggtagataagaaacccctggtttgtctgggaggttgaacagtggcttattgtggaatctctttgtgcctggtgttctcctagatccaattctggtacagcagttgcgccggacatacaaatatttcaaagattatagacagatgatcatcgagcccaccagcccttgccttctcccagaccctntgcaggaaccgtactaccagccaccctacacgctcgttttggagctcaccggcgtcctcttgcatcctgagtgctgg

SEQ ID NO: 379 - DNA, 494 bp, Homo sapiens
ccttatttctcttgtcctttcgtacagggaggaatttgaagtagatagaaaccgacctggattactccggtctgaactcagatcacgtaggactttaatcgttgaacaaacgaacctttaatagcggctgcaccatcgggatgtcctgatccaacatcgaggtcgtaaaccctattgttgatatggactctagaataggattgcgctgttatccctagggtaacttgttccgttggtcaagttattggatcaattgagtatagtagttcgctttgactggtgaagtcttagcatgtactgctcggaggttgggttctgctccgaggtcgccccaaccgaaatttttaatgcaggtttggtagtttaggacctgtgggtttgttaggtactgtttgcattaataaattaaagctccatagggtcttctcgtcttgctgtgtcatgcccgcctcttcacgggcaggtcaatttcactggttaaaagtaagagacag

SEQ ID NO: 380 - DNA, 541 bp, Homo sapiens
aaattcattgacacccaaattctatgtggcacttacagggacctcttcattgatatcaggactaatatttatatttgaatggtggtacttccataagcatggcacatcttttattgagcaagtatctgtaaaccatttgcaaccactgatgggaggaacagagagcagcatttcagaaccaggttctccttcgaggaacagagaaaatgaaaccagcagacagaatttgtcagaatgtaaggtatggagaaaccctctaaatcttttcagaggagcagaatataggagatacacttgggtgactggtaaagagccacttacatactatgacatgaacctgtcagctcaggaccatcagacctttttcacctgtgacacagattttttacgtccttcagacacagttatgcagaaggcttggagggaaagaaatcctccagctcgaatcaaagcagcctatcaagctttagaattaaacaatgactgtgccactgcatatgttctactggctgaggaagaagcaacaactattgtagatgct

SEQ ID NO: 381 - DNA, 534 bp, Homo sapiens
cgccgagagccttagccgacggaaactggacactggaccggcagcgccatgagactcctcccccgcttgctgctgcttctcttactcgtgttccctgccactgtcttgttccgaggcggccccagaggctcgttagcagtggcacaagatcttacagaggatgaagaaacagtagaagattccataattgaggatgaagatgatgaagccgaggtagaagaagatgaacccacagatttggtagaagataaagaggaagaagatgtgtctggtgaacctgaagcttcaccgagtgcagatacaactatactgtttgtaaaaggagaagattttccagcaaataacattgtgaagttcctggtaggctttaccaacaagggtacagaagattttattgttgaatccttagatgcctcattccgttatcctcaggactaccagttttatatccagaatttcacagctcttcctctgaacactgtagtgccaccccagagacaggcaacttttgagtactctttcattcctgcagag

SEQ ID NO: 382 - DNA, 316 bp, Homo sapiens
attgctttcagtgatagggcagaagaatttaagaaactcaactgccaagtgattggtgcttctgtggattctcacttctgtcatctagcatgggtcaatacacctaagaaacaaggaggactgggacccatgaacattcctttggtatcagacccgaagcgcaccattgctcaggattatggggtcttaaaggctgatgaaggcatctcgttcaggggcctttttatcattgatgataagggtattcttcggcagatcactgtaaatgacctccctgttggccgctctgtggatgagactttgagactagttcagg

SEQ ID NO: 383 - DNA, 525 bp, Homo sapiens
ccaccaaacaattcgagcagctccaggcagccatacatacagaccttggggccttagaaaaatcagtcagtgccctagaaaagtctctgacctcgttgtctgaggtggtcctacagaaccggagaggattagatctgctgttcctaaaagaaggaggattatgtgctgccctaaaagaagaatgctgtttctatgcagaccacactggcgtagtaagggatagcatggctaagctaagagaaaggctaaaccagaggcaaaaattgttcgaatcaggacaagggtggtttgagggactgtttaacaggtccccatggttcacgaccctgatatccaccattatgggccctctgatagtacttttattaatcctactcctcggaccctgcattctcaaccgcttggtccagtttgtaaaagacagaatttcggtggtgcaggccctggttctgacccaacagtatcaccaactcaaatcaatagatccagaagaagtagaatcgcgtgaataaaagattttattca

SEQ ID NO: 384 - DNA, 505 bp, Homo sapiens
ccaccaaacaattcgagcagctccaggcagccatacatacagaccttggggccttagaaaaatcagtcagtgccctagaaaagtctctgacctcgttgtctgaggtggtcctacagaaccggagaggattagatctgctgttcctaaaagaaggaggattatgtgctgccctaaaagaagaatgctgtttctatgcagaccacactggcgtagtaagggatagcatgactaagctaagagaaaggctaaaccagaggcaaaaattgttcgaatcaggacaagggtggtttgagagactgtttaacaggtccccatggttcacgaccctgatatccaccattatgggccctctgatagtacttttattaatcctactcctcggaccctgcattctcaaccgcttggtccagtttgtaaaagacagaatttcggtggtgcaggccctggttctgacccaacagtatcaccaactcaaatcaatagatccagaaaaagtagaatcgcg

SEQ ID NO: 385 - DNA, 570 bp, Homo sapiens
ctggaacgtcagcccagcgagccgaactgatcgcactcacccaagccctgaaaatggcagaaggtaagaagctaaatgtttacactgatagccgctatgccttcgctacggcccatgttcatggggaaatatataggagacgggggttgctgacctcagaaggcaaggaaatcaagaacaaaagcgagatcctagccttgctgaaagccctctttttgccaaagagactcagtattatccattgcccaggacatcagaaaggagacagtgccgaagccagaggcaaccgtatggcagaccaggcggcccgagaggcagccacaaaaacagttccagaagcctctacactccttatagaggactcgaccccgtacacgcctgcctatctccattacaccgaaacagatctaaaaagattgcgagaactgggggccacctataatcagataaaaggatattgggtcctacaaggcaagccggtgatgcccgatcagtttgtgtttgaattattagactcccttcatagactcacccatctcagccctcaaagatgaaggcgctccttgacag

SEQ ID NO: 386 - DNA, 489 bp, Homo sapiens
  misc_feature 336, 337: n = A,T,C or G
ctgagctaagttgtcagcacaccccccaaagcaaggactgttagaaatccggactcttgatcagatctgagtttatcattaatgtgtcacttgaattgagctttagaatcttgaaaatcgtgttccttactcagcagacacactcccacccacacccacagccacacatacattggggccctcagcctgaggtgccatccagccttatgtagggtcatggtacagatcagatccatggcacacgattacaataggaagaagtgaaagttgtttttattgtttatatattatcaagcaggcatctgatgacctgtggaattagaaataccagcaganntttccaaggggtaggtgcacaggtcaacagaactaaactacagtgatcttcccttagatccttttctactgaggtgaatagctcaaaagacaaggatgcctttagtccaggctaacccctgtagcctctacgcaattaacacagaggaaagg

SEQ ID NO: 387 - DNA, 257 bp, Homo sapiens
ccttttagtactaaaattttaacctgtgttctaagtagaaactgatttaacccaagtaatgcagctttgattgatttcagcattcgttgctttgctatttttacaaaacagcattgattgaagcaagtcttggttttactaaggtagggtagcatttgctattggtaaagagaataaatacacttaatttcacaatacattgttatatgtaccccagttgttgttagtggggactatgatactgtaataatattttt

SEQ ID NO: 388 - DNA, 482 bp, Homo sapiens
  misc_feature 462: n = A,T,C or G
cttttattaatcctactcctcggaccctgcattctcaaccgcttggtccagtttgtaaaagacagaatttcggtggtgcaggccctggttctgacccaacagtatcaccaactcaaatcaatagatccagaaaaagtagaatcgcgtaaataaaagattttattcagtttccagaaagaggggggaatgaaagaccccaccataaggcttagcaagctagctgcagtaacgccattttgcaaggcatgaaaaagtaccagagctgagttctcaaaagtcacaaggaagtttagttaaagaataaggctgaacaaaactgggacagggaccaaacaggatatctgtggtcgagcacctgggccccggctcagggccaagaacagatggtactcagataaagcgaaactagcaacagtttctggaaagtcccacctcagtttcaagttccccaaaagaccgggnaaaaaccccaagccttattt

SEQ ID NO: 389 - DNA, 461 bp, Homo sapiens
  misc_feature 391: n = A,T,C or G
aaataaggcttggggtttttcccggtcttttggggaacttgaaactgaggtgggactttccagaaactgttgctagtttcgctttatctgagtaccatctgttcttggccctgagccggggcccaggtgctcgaccacagatatcctgtttggcccctgtcccagttttgttcagccttattctttaactaaacttctttgtgacttttgagaactcagctctggtactttttcatgccttgcaaaatggcgttactgcagctagcttgctaagccttatggtggggtctttcattcccccctctttctggaaactgaataaaatcttttattcacgcgattctacttcttctggatctattgatttgagttggtgatactgttgggtcanaaccagggcctgcaccaccgaaattctgtcttttacaaactggaccaagcggttgagaatgcagggtccg

SEQ ID NO: 390 - DNA, 474 bp, Homo sapiens
ctgtgatttttcttcttttggtctattcagtagaaagtgaactatctgaagtagaacatcatcattaaaacctttcacatcattatcctcaattgtttcataaagaggcttactttgtgtaccccaacatatatttttacgagggttattttgatcagcttgtgtagtcagtgccaaagtatttagctggtagcagaaaaaggaaaagtattttccatctgtgatcacagcctgggagacaaaaggtcgagtaacatctgcttcactccagaatccttgatacatggcttgtgctccagtccaagcaaaaaggcttgcaatagcattagctctaaaaacaacttctatctgatcagcacagttttgtctcaaaagcctttcccttcttaatttgtcaggtaacagatgaaactgggtgtgaccgtaacagcaaggatctgcagtttttgagccaacaaatatgtggttttcata

SEQ ID NO: 391 - DNA, 419 bp, Homo sapiens
aaaacagtgaaaagaaaaataaatatctgaagaataagaatacagggctgggtgcagtggctcatgcctgcaatcccagcactttgggaggcggaggcaggtggaccgcttgagcccaggagttcgagaccagcctgggcaacacagtgagacccccctctttacaaaaaatacaaaaattagccaggtgtggtggtgcacctgtagtcccagctacttgagaggctgaggtgggagggtcacttgaacccaggagtcggaggttacagtgagccctgatgggccactgcactccaacctgggcaacggagcaagaccctgtctaaaaaaaaaaaaagaatacaggagtggggtggggtagtggggctggagacttgaggtgtcctggctttggtagtcttgagtgggggcgccagagg

SEQ ID NO: 392 - DNA, 566 bp, Homo sapiens
ccaccaaacaattcgagcagctccaggcagccatacatacagaccttggggccttagaaaaatcagtcagtgccctagaaaagtctctgacctcgttgtctgaggtggtcctacagaaccggagaggattagatctgctgttcctaaaagagggaggattatgtgctgccctaaaagaagaatgctgtttctatgcagaccacactggcgtagtaagggatagcatggctaagctaagagaaaggctaaaccagaggcaaaaattgttcgaatcaggacaagggtggtttgagggactgtttaacaggtccccatggttcacgaccctgatatccaccattatgggccctctgatagtacttttattaatcctactcctcggaccctgcattctcaaccgcttggtccagtttgtaaaagacagaatttcggtggtgcaggccctggttctgacccaacagtatcaccaactcaaatcaatagatccagaagaagtagaatcgcgtgaataaaagattttattcagtttccagaaagaggggggaatgaaagacccaccataaggc

SEQ ID NO: 393 - DNA, 257 bp, Homo sapiens
cctctcttcaggcatcagaaccaaattagagtgctttatacgtgcaaggaactaatgcagaaagacattatgggtaagtcaagggagatgccccagccattgggcaaattcctctgactcctccctgatggaactaattctttttcttctgtgcccggatcctagaatcaagattcttaaggtctgagtacaagttccgcttcaggatggcgctgctgcacagcagggcaccttgcagggccccgaccagtccacag

SEQ ID NO: 394 - DNA, 457 bp, Homo sapiens
  misc_feature 392: n = A,T,C or G
aaataaggcttggggtttttcccggtcttttggggaacttgaaactgaggtgggactttccagaaactgttgctagtttcgctttatctgagtaccatctgttcttggccctgagccggggcccaggtgctcgaccacagatatcctgtttggcccctgtcccagttttgttcagccttattctttaactaaacttccttgtgacttttgagaactcagctctggtactttttcatgccttgcaaaatggcgttactgcagctagcttgctaagccttatggtggggtctttcattcccccctctttctggaaactgaataaaattttttatttacgcgattttactttttctggatttattgatttgagttggtgatactgttgggttagnactagggcctgcaccaccgaaattctgttttttacaaactggaccaagcggttgagaatgcaggg

SEQ ID NO: 395 - DNA, 480 bp, Homo sapiens
  misc_feature 21, 47, 93, 110, 130, 184, 222, 236, 283, 291, 330, 354, 468: n = A,T,C or G
ccttcatcatctcctgctcanaatactacaatggcctaactcttcancatttcttctggctctcctagctcaaaatccatcctccacttcacntccaattttctgtcacntccctgaagaagtggggacntgatttaacatccttttcactcagagaagagtccaaattcctaggcatggaatncaaaggttctttacaatatgcctctcccgtcacatctntccaagcaggtaanataccaccttacctgcaaatcttaacttacatatgtatggcaaaatntacccagntgatcagtacatatcctgcactgtatcaaattagctgtntatatgtcttctcctatactacantgtgtgcatgtacatatatgtccgcttattactcattcacttaataaaaatctcttaagcacttacagtttgccaatcaccagaacagtgtacactccccacacagagtagtanggggagaacagt

SEQ ID NO: 396 - DNA, 487 bp, Homo sapiens
  misc_feature 446: n = A,T,C or G
ccaaaagaagtaagacagcttgctgaagatttcctgaaagactatattcatataaacattggtgcacttgaactgagtgcaaaccacaacattcttcagattgtggatgtgtgtcatgacgtagaaaaggatgaaaaacttattcgtctaatggaagagatcatgagtgagaaggagaataaaaccattgtttttgtggaaaccaaaagaagatgtgatgggcttaccagaaaaatgaggagagatgggtggcctgccatgggtatccatggtgacaagagtcaacaagagcgtgactgggttctaaatgaattcaaacatggaaaagctcctattctgattgctacagatgtggcctccagagggctagatgtggaagatgtgaaatttgtcatcaattatgactaccctaactcctcagaggattatattcatcgaattggaangaactgctcgcagtaccaaaacaggcacagcatacactttc

SEQ ID NO: 397 - DNA, 257 bp, Homo sapiens; identical to SEQ ID NO: 387

SEQ ID NO: 398 - DNA, 187 bp, Homo sapiens
aaaagtcacttgcttagttgatgtcagcgtatgtgtatttggtggggaaaacctaatttcggggatttctgtggtaggtaataggagaagaaagggcactgggggctgttctccttccttccctgggctgtatccatggactcctggaaggcacagagaagggagctataagaggatgtgaagtttt

SEQ ID NO: 399 - DNA, 345 bp, Homo sapiens
ccatttcatgccaatggcagcaaacaacaggattaactagggcaaaataaataagtgtgtggaagccctgataagtgcttaataaacagactgattcactgagacatcagtacagatacatcttgcttaaacaacacagaagttcctgaaaagttttgtgtaaatgatataaccacaaacattaccaggagagcttggtaactgaaagaattccatggcgaattcttttgtgaacaactactttcacttttgtaaatccaggtatttgctttttataaggagtttacctagttgctacctctctgaactgaggaaacagcatattcaccaaacgttgtgctccag

SEQ ID NO: 400 - DNA, 542 bp, Homo sapiens
ccaccaaacaattcgagcagctccaggcagccatacatacagaccttggggccttagaaaaatcagtcagtgccctagaaaagtctctgacctcgttgtctgaggtggtcctacagaaccggagaggattagatctgctgttcctaaaagaaggaggattatgtgctgccctaaaagaagaatgctgtttctatgcagaccacactggcgtagtaagggatagcatggctaagctaagagaaaggctaaaccagaggcaaaaattgttcgaatcaggacaagggtggtttgagggactgtttaacaggtccccatggttcacgaccctgatatccaccattatgggccctctgatagtacttttattaatcctactcctcggaccctgcattctcaaccgcttggtccagtttgtaaaagacagaatttcggtggtgcaggccctggttctgacccaacagtatcaccaactcaaatcaatagatccagaagaagtagaatcgcgtgaataaaagattttattcagtttccagaaagagggg

SEQ ID NO: 401 - DNA, 542 bp, Homo sapiens; identical to SEQ ID NO: 400

SEQ ID NO: 402 - DNA, 402 bp, Homo sapiens
  misc_feature 5, 15, 23, 154, 259, 334, 345: n = A,T,C or G
ccagnagacagatanaactacancaagaaatagagaatctgtttatttactgctagatatgattgtacaagaatctccattccttacaatggatcttttggaatcttgttttccttatgtcttgctgagaaatgcataccatgctgtctacaancaaagtgttacatcttctgcataaaattacctacttaatcaagataagcacgcatttttgttgccttggttttacctgtagactgtggaactattttaccttaanacctgaaaaagttttgtggattataaatttctttcatacggttgtattttctgatcattggtttcttaatatggntgtactacagnatacttggttgatttaggttgcacattcactgaattcactgagattattcctataat

SEQ ID NO: 403 - DNA, 518 bp, Homo sapiens
ctgaggacggaagggtttgtttcccgtttgaacctaaacgcaagtggaaaagaatactcagaatgtatttttctactttacatctgctggggaaggaaatgtgtcaggaagccgctgcatctggtcatttcatcgcatcagaatcacagcagacgtggaagattccatgtggtggggaataaagaaataactttatgctctcctgaaaaacagcgggagcctatgtgtgtgtgcgacactgtaatctcaaggagattcactcagagctgtctcagtccaactcctgcatgaccagatcttcccttagcatcttttctgtgatgaaatattatcttgtgttagagttaggaataggaactaacctgtaggagcatgtccccaaatggacatttgaatggactaacaaaaacaactggaaagactgaatttccgacacaaaggaatgatgggatcaaaaagaaagcagtgaggagttcttgagtcttgtagtacctattcttattttaacttgcttcatc

SEQ ID NO: 404 - DNA, 475 bp, Homo sapiens; identical to SEQ ID NO: 377

SEQ ID NO: 405 - DNA, 457 bp, Homo sapiens
aaataaggcttggggtttttcccggtcttttggggaacttgaaactgaggtgggactttccagaaactgttgctagtttcgctttatctgagtaccatctgttcttggccctgagccggggcccaggtgctcgaccacagatatcctgtttggcccctgtcccagttttgttcagccttattctttaactaaacttccttgtgacttttgagaactcagctctggtactttttcatgccttgcaaaatggcgttactgcagctagcttgctaagccttatggtggggtctttcattcccccctctttctggaaactgaataaaatcttttatttacgcgattctactttttctggatctattgatttgagttggtgatactgttgggtcagaaccagggcctgcaccaccgaaattctgtcttttacaaactggaccaagcggttgagaatgcaggg

SEQ ID NO: 406 - DNA, 474 bp, Homo sapiens
  misc_feature 464: n = A,T,C or G
ctgctgcctgtggcgtgtgtgggctggatcccttgaaggctgagtttttgagggcagaaagctagctatgggtagccaggtgttacaaaggtgctgccccttctccaacccctacttggtttccctcaccccaagcctcatgttcataccagccagtgggttcagcagaacgcatgacaccttatcacctccctccttgggtgagctctgaacaccagctttggcccctccacagtaaggctgctacatcaggggcaaccctggctctatcattttccttttttgccaaaaggaccagtagcataggtgagccctgagcactaaaaggaggggtccctgaagctttcccactatagtgtggagttctgtccctgaggtgggtacagcagccttggttcctctgggggttgagaataagaatagtggggagggaaaaactcctccttgaagatttcctgtctcanagtcccagag

SEQ ID NO: 407 - DNA, 527 bp, Homo sapiens
ccaccaaacaattcgagcagctccaggcagccatacatacagaccttggggccttagaaaaatcagtcagtgccctagaaaagtctctgacctcgttgtctgaggtggtcctacagaaccggagaggattagatctgctgttcctaaaagaaggaggattatgtgctgccctaaaagaagaatgctgtttctatgcagaccacactggcgtagtaagggatagcatggctaagctaagagaaaggctaaaccagaggcaaaaattgttcgaatcaggacaagggtggtttgagggactgtttaacaggtccccatggttcacgaccctgatatccaccattatgggccctctgatagtacttttattaatcctactcctcggaccctgcattctcaaccgcttggtccagtttgtaaaagacagaatttcggtggtgcaggccctggttctgacccaacagtatcaccaactcaaatcaatagatccagaagaagtagaatcgcgtgaataaaagattttattcagt

SEQ ID NO: 408 - DNA, 491 bp, Homo sapiens
  misc_feature 125, 126, 475: n = A,T,C or G
ccaaaggttctgaaactctcacaacgggtgcccaactcaaggaaaactcactcaccctaaagatattcctgctaacctcacaattcctgggttccctctcatctagccagaacaaactgccttgnngtcttctccccacccacatctaccttcatggcaaacaagccaacaaaacacacaagccccccccgcaagtccctaaccccgtaagtaggttaatagcaaaacaaaatataagtacattctcatcattagattggttgttgctgtccttgcacaactggttaaggaaaaatgaattattctgtaatttctgaagaatccaaatcctgtctcttataaagtcagaacagaagggggcaaaaggtggtggtgagcatcaagagagaaaaaaggagaaaattatttacagaaaataggagacaggagggagtgtccgcaagaaaagacttcattgtcacttcttcttgccggncctcttggcactggac

SEQ ID NO: 409 - DNA, 396 bp, Homo sapiens
aaataaggcttggggtttttcccggtcttttggggaacttgaaactgaggtgggactttccagaaactgttgctagtttcgctttatctgagtaccatctgttcttggccctgagccggggcccaggtgctcgaccacagatatcctgtttggcccctgtcccagttttgttcagccttattctttaactaaacttccttgtgacttttgagaactcagctctggtactttttcatgccttgcaaaatggcgttactgcagctagcttgctaagccttatggtggggtctttcattcccccctctttctggaaactgaataaaatcttttattcacgcgattctacttcttctggatctattgatttgagttggtgatactgttgggtcagaacca

SEQ ID NO: 410 - DNA, 337 bp, Homo sapiens
cctgtggaatgcagcattacctgctggacagagcagggcaggcagttctatgccttggagctcctgactgcagggactctgtccccacactcagaaagactcagctcactcaatgagagaatgtgatttactttatagaacgtataatcaactttgttgaataatttgttctattaaggctgtctaaagtatgtgatgtcttcatcatagtatgaagtgttgaaaattaataacgagcctagtttaggaaaaagctgcttaaaactgtggctctaagagagtaatcataaaataccttagataaaattgcactatggaattttcattgagtatgttt

SEQ ID NO: 411 - DNA, 358 bp, Homo sapiens
ctgaaacttacaaatttaacattatcaaagaaggaatgcttctacactcttacaaagaccactagaaagaaacaacaattaaaaagctaagaaactgtctcaaaggcatttttttttacaatccttcctccacagtaaggtaatgttattaaataatccaatccattcacaaaatggctctctgcatctgctctggtgtcttctgccatatcactgcatatttatgcatgactgagataagagtttccttaacattgttatttcgataacctgaagctgttctgttacctctgggctctcatcctctcctatttatacagtgaagcccatggcaaataggaagaagctcagtatcggc

SEQ ID NO: 412 - DNA, 171 bp, Homo sapiens
ctgattgaacctgtacagtatgatgagcaaggaatggcctttagcaaaagcgaaggtaaaagaaagactgcaaaagcagaagcaattgtttataaacatggaagtggaagaataaaagtaaatggaattgattaccagctttacttcccgatcacacaggacagagaacag

SEQ ID NO: 413 - DNA, 131 bp, Homo sapiens
cctaaaagatcactatctttcattcagggaaatcagaaactacttctagcagggggagggaggcaggcagggaaagtagaaagggcctgggcagagctgtaatcctcagaacttgtcagccttcagttccc

SEQ ID NO: 414 - DNA, 276 bp, Homo sapiens
  misc_feature 56: n = A,T,C or G
aaaagttataattctacaatcccaagggagtagaggttatagtcattgaatgactncttgataccatgtcctcttcgtacttcgattactttttaacacctgtgggtatgtataaacgattacacttgtttgcctcctccacctcgcactgccactggctggctgttctgaacaaatgcacctcctccacgaattgcacttgggtgagttggagaagctgctggatgttgcccgggacgaataggtttagcaatctgtgcagaatgccctcttctg

SEQ ID NO: 415 - DNA, 514 bp, Homo sapiens
aaaagaccatagtaatcagatctacttgaaaaattaagtgaattgatttggttggaatgctcttttaccgatgctttaacatacagccactagattcccagaagttgtgcatgagttcctgtgaggagagttggcatcttggaaatcaaagacggttgtgatgcagttttttgatatgaggataacaggaagcgtcaggacaatcatgcccataagaactctaaactgttcagatcattttatcttagtgaaactggcaattgaactttgctctagttgatgggcaaaatttctcctagactattcatcatcccaatttcatcctagttgaaaattttcaaatgccataagaaatctttatagatttgcacttagcttttggatggacgtttctacaatggagagaactgtgttatagccctggtccaaggacattactagctaatgcccatcgactgtggtgtgcgtgtgggaggttccaaagagaaggagcaatcagcaagtttgcagacac

SEQ ID NO: 416 - DNA, 472 bp, Homo sapiens
aaataaggcttggggtttttcccggtcttttggggaacttgaaactgaggtgggactttccagaaactgttgctagtttcgctttatctgagtaccatctgttcttggccctgagccggggcccaggtgctcgaccacagatatcctgtttggcccctgtcccagttttgttcagccttattctttaactaaacttccttgtgacttttgagaactcagctctggtactttttcatgccttgtaaaatggcgttactgcagctagcttgctaagccttatggtggggtctttcattcccccctctttctggaaactgaataaaatcttttattcacgcgattctacttcttctggatctattgatttgagttggtgatactgttgggtcagaaccagggcctgcaccaccgaaattctgtcttttacaaactggaccaagcggttgagaatgcagggtccgaggagtaggat

SEQ ID NO: 417 - DNA, 507 bp, Homo sapiens
gcggccgcagccatgagtatgctcaggcttcagaagaggctcgcctctagtgtcctccgctgtggcaagaagaaggtctggttagaccccaatgagaccaatgaaatcgccaatgccaactcccgtcagcagatccggaagctcatcaaagatgggctgatcatccgcaagcctgtgacggtccattcccgggctcgatgccggaaaaacaccttggcccgccggaagggcaggcacatgggcataggtaagcggaagggtacagccaatgcccgaatgccagagaaggtcacatggatgaggagaatgaggattttgcgccggctgctcagaagataccgtgaatctaagaagatcgatcgccacatgtatcacagcctgtacctgaaggtgaaggggaatgtgttcaaaaacaagcggattctcatggaacacatccacaagctgaaggcagacaaggcccgcaagaagctcctggctgaccaggctgaggcccgcaggtctaag

SEQ ID NO: 418 - DNA, 238 bp, Homo sapiens
aaaaaacaactgaattgtattaattattcacaaaaggaatgacaatccccaaatttgagtggatttctgggtggttcaaggaagcttctacatgtttttcacaggtaatgacactactagttaacagctctggatgtagatgggcaagactggacggccatgcagagaaaagaaaggtgggagtgaaactttacagagaaagcacctgagatgagggaaaggcaccttaggtgtgttt

SEQ ID NO: 419 - DNA, 543 bp, Homo sapiens
  misc_feature 510, 537: n = A,T,C or G
aaaattaggccatattataaaaaacagtccacggtcttacattcagcaaattcatactaaaatactccatttttgtaagataaaggccaagaaaactttacatatgctacaagtttattacagatatttacatggctctttctcccctaggtacttaaaattttcacattatccaactccccaaagcaagctttgcaggaatgatgaggcgggagcactattagaatagcttgtgcagtgctgtaatacaaaaatgtattttgaaagctattgagtgaccattaaatactgtttctataaaaaatggttttggtgtatttgttgacagacacttaatccactacatttaataaacagggccattggggtgtactatgtctcattctaatgagctccaaatgccctttccacccactgtacaattcactaaaatgcaattattacgaaaaattcacattttctttcagcagtgcatcaggttagcatattactggtttggggtgtttctantatactaaaccttcagatgtttacctnattctg

SEQ ID NO: 420 - DNA, 479 bp, Homo sapiens
cctcttactgaggaagaaattgttgacctaagagaaaggcattatgattccattgccgaaaaacaaaaagatcttgataagaaaattcaaaaagagttagccttacaagaagagaagttaagactagaagaagaagctttatacgctgcacagcgtgaagcagccagggcagcaaagcagcgaaagctcttggagttcaggaccagaagatgacttcgaatcttgtttgagaaatatgaagtcacagtatgaagtttttcgaagtagtagactctcatcagatgctacagttttgacaccaaatacagaaagcagttgtgatttaatgaccaaaactaaatcaactagtggaaatgacgacagcacatccttagatctagagtgggaagatgaagaaggtattttataattcacaattttacctgaaaaatttaacgtaatctgtgttgatttatgtaaatctaccttggtctttattt

SEQ ID NO: 421 - DNA, 532 bp, Homo sapiens
  misc_feature 1, 42, 170, 199, 234, 237, 277, 382, 464, 505: n = A,T,C or G
nccaccaaacaattcgagcagctccaggcagccatacatacngaccttggggccttagaaaaatcagtcagtgccctagaaaagtctctgacctcgttgtctgaggtggtcctacagaaccggagaggattagatctgctgttcctaaaagaaggaggattatgtgctgncctaaaagaagaatgctgtttctatgcanaccacactggcgtagtaagggatagcatggctaanctnagagaaaggctaaaccagaggcaaaaattgttcgaatcangacaagggtggtttgagggactgtttaacaggtccccatggttcacgaccctgatatccaccattatgggccctctgatagtacttttattaatcctactcctcngaccctgcattctcaaccgcttggtccagtttgtaaaagacagaatttcggtggtgcaggccctggttctgacccaacagtntcaccaactcaaatcaatagatccagaagaagtagaatcgngtgaataaaagattttattcagtttcc

SEQ ID NO: 422 - DNA, 542 bp, Homo sapiens; identical to SEQ ID NO: 400

SEQ ID NO: 423 - DNA, 300 bp, Homo sapiens
  misc_feature 6, 11, 44, 71, 97, 111, 125, 134, 137, 183, 196, 286: n = A,T,C or G
aaaatnatttngtggttgcattgtggatgcaaatctgagcgttntcaacttggttattgtaaaaaaagganagaaggatattcctggactgactganactacagtgcctcnccgcctggccccanaagagctancanaatccgcaaacttttcaatctctctaaagaagatgatgtccgccantatgttgtaaganagcccttaaataaagaaggtaagaaacctaggaccaaagcacccaagattcagcgtcttgttactccacgtgtcctgcagcacaaacggnggcgtattgctctg

SEQ ID NO: 424 - DNA, 494 bp, Homo sapiens
ccttatttctcttgtcctttcgtacagggaggaatttgaagtagatagaaaccgacctggattactccggtctgaactcagatcacgtaggactttaatcgttgaacaaacgaacctttaatagcggctgcaccatcgggatgtcctgatccaacatcgaggtcgtaaaccctattgttgatatggactctagaataggattgcgctgttatccctagggtaacttgttccgttggtcaagttattggatcaattgagtgtagtagttcgctttgactggtgaagtcttagcatgtactgctcggaggttgggttctgctccgaggtcgccccaaccgaaatttttaatgcaggtttggtagtttaggacctgtgggtttgttaggtactgtttgcattaataaattaaagctccatagggtcttctcgtcttgctgtgtcatgcccgcctcttcacgggcaggtcaatttcactggttaaaagtaagagacag

SEQ ID NO: 425 - DNA, 552 bp, Homo sapiens
ccaccaaacaattcgagcagctccaggcagtcatacatacagaccttggggccttagaaaaatcagtcagtgccctagaaaagtctctgacctcgttgtctgaggtggtcctacagaaccggagaggattagatctgctgttcctaaaagaaggaggattatgtgctgccctaaaagaagaatgctgtttctatgcagaccacactggcgtagtaagggatagcatggctaagctaagagaaaggctaaaccagaggcaaaaattgttcgaatcaggacaagggtggtttgagggactgtttaacaggtccccatggttcacgaccctgatatccaccattatgggccctctgatagtacttttattaatcctactcctcggaccctgcattctcaaccgcttggtccagtttgtaaaagacagaatttcggtggtgcaggccctggttctgacccaacagtatcaccaactcaaatcaatagatccagaagaagtagaatcgcgtgaataaaagattttattcagtttccagaaagaggggggaatgaaag

SEQ ID NO: 426 - DNA, 517 bp, Homo sapiens
gaaaaatcagtcagtgccctagaaaagtctctgacctcgttgtctgaggtggtcctacagaaccggagaggattagatctgctgttcctaaaagaaggaggattatgtgctgccctaaaagaagaatgctgtttctatgcagaccacactggcgtagtaagggatagcatggctaagctaagagaaaggctaaaccagaggcaaaaattgttcgaatcaggacaagggtggtttgagggactgtttaacaggtccccatggttcacgaccctgatatccaccattatgggccctctgatagtacttttattaatcctactcctcggaccctgcattctcaaccgcttggtccagtttgtaaaagacagaatttcggtggtgcaggccctggttctgacccaacagtatcaccaactcaaatcaatagatccagaagaagtagaatcgcgtgaataaaagattttattcagtttccagaaagaggggggaatgaaagaccccaccataaggcttagca

SEQ ID NO: 427 - DNA, 522 bp, Homo sapiens
aaaatcactgtatatttggatgttaaagcaggtagtaatacagcaggaaaagtgtttctaattcacagtttcaaaactaaagggtgcagttttcaaatatctgattgcttaaattggtcactcaatttaacaactgcctccttcaatacatgtaaactatgtttgcacagcattaggagatgtcttttatttcagaattagttcttactgttacaggagcaccacaaattttaaggaagaggctacagtgtgaaatgagctcactgaaggatatgttaaataaaattttaactacaatataaggtactgcaaaagctttgttccccagcacagatcccttaatcaggaaaagtagtgaacacttacccaatacaatatgtaaattcgctctacaggagatggggaaaaacctaactcaactaaaagaaaatactattattagctaacaaacctgtaatagctggcttcagaattttcctaaaaataaaattcaaaagcatacacagtatttatatcctttga

SEQ ID NO: 428 - DNA, 560 bp, Homo sapiens
  misc_feature 496: n = A,T,C or G
ccaccaaacaattcgagcagctccaggcagccatacatacagaccttggggccttagaaaaatcagtcagtgccctagaaaagtctctgacctcgttgtctgaggtggtcctacagaaccggagaggattagatctgctgttcctaaaagaaggaggattatgtgctgccctaaaagaagaatgctgtttctatgcagaccacactggcgtagtaagggatagcatggctaagctaagagaaaggctaaaccagaggcaaaaattgttcgaatcaggacaagggtggtttgagagactgtttaacaggtccccatggttcacgaccctgatatccaccattatgggccctctgatagtacttttattaatcctactcctcggaccctgcattctcaaccgcttggtccagtttgtaaaagacagaatttcggtggtgcaggccctggttctgacccaacagtatcaccaactcaaatcaatagatccagaaaaagnagaatcgcgtaaataaaagattttattcagtttccagaaagaggggggaatgaaagaccccacc

SEQ ID NO: 429 - DNA, 483 bp, Homo sapiens
ctgaaaaagagtgatcctcaatatcctaactaactggtcctcaactcaagcagagtttcttcactctggcactgtgatcatgaaacttagtagaggggattgtgtgtattttatacaaatttaatacaatgtcttacattgataaaattcttaaagagcaaaactgcattttatttctgcatccacattccaatcatattagaactaagatatttatctatgaagatataaatggtgcagagagactttcatctgtggattgcgttgtttcttagggttcctagcactgatgcctgcacaagcatgtgatatgtgaaataaaatggattcttctatagctaaatgagttccctctggggagagttctggtactgcaatcacaatgccagatggtgtttatgggctatttgtgtaagtaagtggtaagatgctatgaagtaagtgtgtttgttttcatcttatggaaactcttgatgcatgtgc

SEQ ID NO: 430 - DNA, 438 bp, Homo sapiens
ccaaaaccgtgaagaaggcggcccgggtcatcatagaaaagtactacacgcgcctgggcaacgacttccacacgaacaagcgcgtgtgcgaggagatcgccattatccccagcaaaaagctccgcaacaagatagcaggttacgtcacgcatctgatgaagcgaattcagagaggcccagtaagaggtatctccatcaagccgcaggaggaggagagagaaaggagagacaattatgttcctgaggtctcagccttggatcaggagattattgaagtagatcctgacactaaggaaatgctgaagcttttggacttcggcagtctgtccaaccttcaggtcactcagcctacagttgggatgaatttcaaaacgcctcggggacctgtttgaattttttctgtagtgctgtattattttcaataaatctgggacaaca

SEQ ID NO: 431 - DNA, 526 bp, Homo sapiens
ccaccaaacaattcgagcagctccaggcagccatacatacagaccttggggccttagaaaaatcagtcagtgccctagaaaagtctctgacctcgttgtctgaggtggtcctacagaaccggagaggattagatctgctgttcctaaaagaaggaggattatgtgctgccctaaaagaagaatgctgtttctatgcagaccacactggcgtagtaagggatagcatggctaagctaagagaaaggctaaaccagaggcaaaaattgttcgaatcaggacaagggtggtttgagggactgtttaacaggtccccatggttcacgaccctgatatccaccattatgggccctctgatagtacttttattaatcctactcctcggaccctgcattctcaaccgcttggtccagtttgtaaaagacagaatttcggtggtgcaggccctggttctgacccaacagtatcaccaactcaaatcaatagatccagaagaagtagaatcgcgtgaataaaagatttattcagt

SEQ ID NO: 432 - DNA, 525 bp, Homo sapiens; identical to SEQ ID NO: 383

SEQ ID NO: 433 - DNA, 494 bp, Homo sapiens; identical to SEQ ID NO: 424

SEQ ID NO: 434 - DNA, 533 bp, Homo sapiens
ccaccaaacaattcgagcagctccaggcagccatacatacagaccttggggccttagaaaaatcagtcagtgccctagaaaagtctctgacctcgttgtctgaggtggtcctacagaaccggagaggattagatctgctgttcctaaaagaaggaggattatgtgctgccctaaaagaagaatgctgtttctatgcagaccacactggcgtagtaagggatagcatggctaagctaagagaaaggctaaaccagaggcaaaaattgttcgaatcaggacaagggtggtttgagagactgtttaacaggtccccatggttcacgaccctgatatccaccattatgggccctctgatagtacttttattaatcctactcctcggaccctgcattctcaaccgcttggtccagtttgtaaaagacagaatttcggtggtgcaggccctggttctgacccaacagtatcaccaactcaaatcaatagatccagaaaaagtagaatcgcgtaaataaaagattttattcagtttccag

SEQ ID NO: 435 - DNA, 481 bp, Homo sapiens
agttccctttttcggtcggcgtggtcttgcgagtggagtgtccgctgtgcccgggcctgcaccatgagcgtcccggccttcatcgacatcagtgaagaagatcaggctgctgagcttcgtgcttatctgaaatctaaaggagctgagatttcagaagagaactcggaaggtggacttcatgttgatttagctcaaattattgaagcctgtgatgtgtgtctgaaggaggatgataaagatgttgaaagtgtgatgaacagtgtggtatccctactcttgatcctggaaccagacaagcaagaagctttgattgaaagcctatgtgaaaagctggtcaaatttcgcgaaggtgaacgcccgtctctgagactgcagttgttaagcaaccttttccacgggatggataagaatactcctgtaagatacacagtgtattgcagccttattaaagtggcagcatcttgtggggccatccagtaca

SEQ ID NO: 436 - DNA, 494 bp, Homo sapiens
cctcttggcctcacatacagttggtatatgaattcttcttgagatttttggagagccctgatttccagcctagcattgcaaaacgatacattgatcagaaatttgtacaacagctcctggagctttttgatagtgaagatcccagagaacgtgacttcctgaagactgttctgcaccgaatttatgggaaatttcttggattaagagcattcatcagaaaacaaattaacaacattttcctcaggtttatatatgaaacagaacatttcaatggtgttgctgaacttcttgaaatattaggaagtattatcaatggctttgcattgccactgaaagcagaacataaacaatttctaatgaaggttcttattcctatgcatactgcaaaaggattagctttgtttcatgctcagctagcatattgtgttgtacagttcctggagaaagatacaacactaacagagccagtgatcagaggactgctgaaattttgg

SEQ ID NO: 437 - DNA, 475 bp, Homo sapiens; identical to SEQ ID NO: 377

SEQ ID NO: 438 - DNA, 455 bp, Homo sapiens
ctgccaatctggactcagcggaaaggcaagctcctggcctcggaagacccagactccagaaatggagctgctattgttggttccaaaaaggatgacactggcgaaggcattcttcctcagcttgtccagtcgctggaacattccagtgatgagattgcagctcatgaaggtctgagtgagttcttcagggaagcgatactctgagtaccacagggaccagccgtccttatcaaagtgctcccagaaatatggcagtgccacagagagtgtgtcctcattggagtacttgcgcttaaattcatccaacacaaaggtactcttgggcaggtgagcgaaggggtccttggccttgggctcagcagccagcgcctgctcacattcatccatctcctcctcaggagcaggggcagccgcctttttctcctccttccgctcagcctggggcttctgcttct

SEQ ID NO: 439 - DNA, 537 bp, Homo sapiens
  misc_feature 500: n = A,T,C or G
ccatgcagcggccaggtccttatgacagacctggggctggtagagggtataacagcattggcggaggagctggctttgagaggatgaggcgtggtgcttatggtggaggctatggaggctatgatgattacaatggctataatgatggctatggatttgggtcagatagatttggaagagacctcaattactgtttttcaggaatgtctgatcacagatacggggatggtggctctactttccagagcacaacaggacactgtgtacacatgcggggattaccttacagagctactgagaatgacatttataattttttttcaccgctcaaccctgtgagagtacacattgaaattggtcctgatggcagagtaactggtgaagcagatgtcgagttcgcaactcatgaagatgctgtggcagctatgtcaaaagacaaagcaaatatgcaacacagatatgtagaactcttcttgaattctacagcaggagcaagcggnggtgcttacgaacacagatatgtagaactcttcttga

SEQ ID NO: 440 - DNA, 525 bp, Homo sapiens
cctgtccagtctttgaaaacatcaagagatacttcaccctcaagtggttcagcagtttcttcatcaaaggtgttagacaaacccagtaggctaactgaaaaggaacttgctgaggctgcaagcaagtgggctgctgaaaagctagagaaatcagatgaaagtaacttgcctgaaatttctgagtatgaggcgggatccacagcaccattgtttactgaccagccagaggaacctgagtcaaacacaacacatgggatagaattatttgaagatagtcagctaaccactcgctctaaagcaatagcatcaaaaaccaaagagattgaacaggtttaccgacaagactgtgaaactttcgggatggtggtgaaaatgctgattgaaaaagatccttcattagaaaagtctatacagtttgcattgaggcagaatttacatgaaataggtgagcggtgtgttgaagaactcaagcatttcattgcagagtatgatacttccactcaagattttggagagcctttttag

SEQ ID NO: 441 - DNA, 533 bp, Homo sapiens
ctgtttacttcagtctggtgtcttcaaccaaaatatgtaccttataccaaaacaatgcttattccaaaatattttttgtagctagtagttctttccttggaggtaaagaaaatacacccaaacttttaattaccaggattcagaatatttaagagaacaattttagttaagaatcaaatatacagagattcaaagaggggaaaaaaaggaaatattatagaagacaaaggtcaaactggcattccagatctggagcaattttgtaaagcaggaaaacaactatgacaatctgtagcttcttagatcattatagtgaatgtccccatttactataagtgtttttataatggtgtttcctaaataaaggaacataaatgtacactaaagggtgtttcccaagaatagaggtgaagatattttcattttgtttaacccacaaactatttggtcaaaggaatatgtaaagctaaataaaagcacatctggtagaaattcatggcaatgcatgttgacaagatgtgcttggacctcgc

SEQ ID NO: 442 - DNA, 235 bp, Homo sapiens
ctgtgctgtggagagaagctgatgttttggtgtattgtcagccatcgtcctgggactcggagactatggcctcgcctccccaccctcctcttggaattacaagccctggggtttgaagctgactttatagctgcaagtgtatctccttttatctggtgcctcctcaaacccagtctcagacactaaatgcagacaacaccttcctcctgcagacacctggactgagccaaggagg

SEQ ID NO: 443 - DNA, 534 bp, Homo sapiens
ccaccaaacaattcgagcagctccaggcagccatacatacagaccttggggccttagaaaaatcagtcagtgccctagaaaagtctctgacctcgttgtctgaggtggtcctacagaaccggagaggattagatctgctgttcctaaaagaaggaggattatgtgctgccctaaaagaagaatgctgtttctatgcagaccacactggcgtagtaagggatagcatggctaagctaagagaaaggctaaaccagaggcaaaaattgttcgaatcaggacaagggtggtttgagggactgtttaacaggtccccatggttcacgaccctgatatccaccattatgggccctctgatagtacttttattaatcctactcctcggaccctgcattctcaaccgcttggtccagtttgtaaaagacagaatttcggtggtgcaggccctggttctgacccaacagtatcaccaactcaaatcaatagatccagaagaagtagaatcgcgtgaataaaagattttattcagtttccaga

SEQ ID NO: 444 - DNA, 348 bp, Homo sapiens
cctgatgcaggtgtccactcacaggtggcgctcacctaggctgtcacaggacccacctccatgccaggcaacagagggccacagaaccacccccacggctcactccttggtctggggccaccttcttgccctttctttttttttttttttccgagatggagtctctctctgtcacccargtgggagtgtggtggcacaatctcggctcactgcaacctycacctsctgagttcaagcaattctcctgcctcarcctcccaagtagytgggactacaggcatgcaccaccacggwcggttaatttttgtttttcgktttttkggtararacggggtttcaccatgttgg

SEQ ID NO: 445 - DNA, 533 bp, Homo sapiens
ccaccaaacaattcgagcagctccaggcagccatacatacagaccttggggccttagaaaaatcagtcagtgccctagaaaagtctctgacctcgttgtctgaggtggtcctacagaaccggagaggattagatctgctgttcctaaaagaaggaggattatgtgctgccctaaaagaagaatgctgtttctatgcagaccacactggcgtagtaagggatagcatggctaagctaagagaaaggctaaaccagaggcaaaaattgttcgaatcaggacaagggtggtttgagggactgtttaacaggtccccatggttcacgaccctgatatccaccattatgggccctctgatagtacttttattaatcctactcctcggaccctgcattctcaaccgcttggtccagtttgtaaaagacagaatttcggtggtgcaggccctggttctgacccaacagtatcaccaactcaaatcaatagatccagaagaagtagaatcgcgtgaataaaagattttattcagtttccag

SEQ ID NO: 446 - DNA, 606 bp, Homo sapiens
aaaaactcatcattgccatgtccaggagaggcaatctagctggagtcaggtgatccagtccattcctgtcaaagcctccaacagctacagcacaaacaccatcagtttgcgatggctggggggccttctggaagaagagaggcaaagaaagtcttgaagacaagccatgctgtgctcataaaggaggggctggtctgctcgccatctagtacatccctgtctggagggaggtggttggggtcttcagtttcaggatcagtgccttcctgtaagttattgttggggtcctgatttacaacgtcaggaggaggaccatcatttgggaagttctgaaccggcctcggtctaaatggaaaccacccaacgtgatgcaggtacataacaacggtggcccccatgaccatgaggaatctgctcagggaggagtagaagtagaggatactgagaaaaacggaaaatgtagctgctgaataggtccaatccaaccaatctcgatttatttcatcatcttcttccacaatagggccaccttgtgcattcatccgcaaattttgattggctccaggattaacaaccacttgaggagcagcattctgattggcaggc

SEQ ID NO: 447 - DNA, 429 bp, Homo sapiens
ctgacgtaagagtgatagaggaatgccattacactgtgcttggagatgcttttaaggaatgctttgtgagtagaccacatcccaagccaaagcagttttcaagttttgaaaaaagagcaaagatattctgtgcccgacagaactgcagccatgactggggaatccatgtgaagtacaagacatttgagattccagttataaaaattgaaagttttgtggtggaggatattgcaactggagttcagacactgtactcgaagtggaaggactttcattttgagaagataccatttgatccagcagaaatgtccaaatgatatcaggtcctcaatcttcagctacagggaatgagtaactttgagtggagaagaaacaaacatagtgggtataatcatggatcgcttgtacccctgtgaaaatatatttttt

SEQ ID NO: 448 - DNA, 572 bp, Homo sapiens
ccaccaaacaattcgagcagctccaggcagccatacatacagaccttggggccttagaaaaatcagtcagtgccctagaaaagtctctgacctcgttgtctgaggtggtcctacagaaccggagaggattagatctgctgttcctaaaagaaggaggattatgtgctgccctaaaagaagaatgctgtttctatgcagaccacactggcgtagtaagggatagcatggctaagctaagagaaaggctaaaccasaggcaaaaattgttcgaatcaggacaagggtggtttgagagactgtttaacaggtccccatggttcacgaccctgatatccaccattatgggccctctgatagtacttttattaatcctactcctcggaccctgcattctcaaccgcttggtccagtttgtaaaagacagaatttcggtggtgcaggccctggttctgacccaacagtatcaccaactcaaatcaatagatccagaaaaagtagaatcgcgtaaataaaagattttattcagtttccagaaagaggggggaatgaaagaccccaccataaggcttarc

SEQ ID NO: 449 - DNA, 553 bp, Homo sapiens
ctgctgcctgtggcgtgtgtgggctggatcccttgaaggctgagtttttgagggcagaaagctagctatgggtagccaggtgttacaaaggtgctgctccttctccaacccctacttggtttccctcaccccaagcctcatgttcataccagccagtgggttcagcagaacgcatgacaccttatcacctccctccttgggtgagctctgaacaccagctttggcccctccacagtaaggctgctacatcaggggcaaccctggctctatcattttccttttttgccaaaaggaccagtagcataggtgagccctgagcactaaaaggaggggtccctgaagctttcccactatagtgtggagttctgtccctgaggtgggtacagcagccttggttcctctgggggttgagaataagaatagtggggagggaaaaactcctccttgaagatttcctgtctcagagtcccagagaggtagaaaggaggaatttctgctggactttatctgggcagaggaaggatggaatgaaggtagaaaggcagaattacag

SEQ ID NO: 450 - DNA, 541 bp, Homo sapiens
cgagcggccgcccggcaggtaaaaagtgatatatgttggagttataaagaaatacactaaggagaggtagtaaatgtgaaccttgttgcagtgtataaggtggaagcctaaagaaatctcaccgaaacttactgctgaatgattacattctcccttaagcagaaaactttggatgtgccatgcaatggtgtctgtgtaattattttgctctttgattaaaaaaaagacccccagcaataaaaagtgggtcactctatgccctctgtgcacattagtctcttgtattcaactttgctgattctctggaattttcctactctttagcataattttgatgattgaaaaatattttggaaaggatgggtcaggtgctttgcctccatagtcttttgaagtgcctgcatatgaacaacaacaacaacaacaaaaaattctgtaaaaaaggaagcccattccacttttcaagtatgctttgttttaagccataaagacacacatgtagttttgtcacattctactagccaaaattttcaagaagggt

SEQ ID NO: 451 - DNA, 235 bp, Homo sapiens
cctcgttcatgcgcgtctcgaagaagcgctgcaggccgatgatggactgcacgtctgccttgtcctcagttaacttgttgaattgcttgaacatgcggcccacatcctgggcaaactcctgtggggagctgtagggaggtgacaacttctcctggaggcgggcacggatcagggtcagatccagggtgccaccgggctggwccagggagaaggtggagtcggtagccabacctcg

SEQ ID NO: 452 - DNA, 612 bp, Homo sapiens
aaatggttctgtgctaatcaaaactttcgttgttattattcgttatggtagaatcatttttaattcacgtgctttgtgttcagttttgtggtctgagagatgtaccaattgtcaaattaccgtgtaccacctaatgtttataggagaaagcaaaatacatcagcttggtagttaacacatcaaatatttcttgctgcttctaggagaacttttttggtgtgtgttggaatggctgagcaaatattaaaattgttaatatgcagccatatatggaaggttcctgtggggttgttttttcgtgttttttttttttttgtggtgggattatgtgcctcccattcactagaaaatgagaaaattgtctgggttccaaaatattgacattgaatggatcaatacacacacacagacatatatatatatgcacacatatataggcagttgcatgctagcatgggtatttttataacaatataactgagttatattggaattataaatattttccgtcacttaaatttgttctttgtttagcctgaaaacctttatggctcaagatcagattcctgactaacccctctyttaragctacagcgagctgcattaccagct

SEQ ID NO: 453 - DNA, 571 bp, Homo sapiens
aaataaggcttggggtttttcccggtcttttggggaacttgaaactgaggtgggactttccagaaactgttgctagtttcgctttatctgagtaccatctgttcttggccctgagccggggcccaggtgctcgaccacagatatcctgtttggcccctgtcccagttttgttcagccttattctttaactaaacttctttgtgacttttgagaactcagctctggtactttttcatgccctgcaaaatggcgttactgcagctagcttgctaagccttatggtggggtctttcattcccccctctttctggaaactgaataaaatcttttattcacgcgattctacttcttctggatctattgatttgagttggtgatactgttgggtcagaaccagggcctgcaccaccgaaattctgtcttttacaaactggaccaagcggttgagaatgcagggtccgaggagtaggattaataaaagtactatcagagggcccataatggtggatatcagggtcgtgaaccatggggacctgttaaacagtccctcaaaccacccttgtcctgattc

SEQ ID NO: 454 - DNA, 520 bp, Homo sapiens
aaatgtaccaatgaaaatagctttttccccttcaaggggaagaaagaaaatcactcctcaaaacccagcagatctggctgtgaggtctttcctcctatctcatctcttcaggcttttttttttttgcagtggagcaagagagaccaaaacctaacctgagttacaagaaacaagacagtaatggctataaagggagtgaccaggagcaactgggacactcctttacctcccatatccaatgtatgtgtttcacagaaaaacaacaaaattaacaaattcacaaaatacaacagctagaattacaaaatccattcatccaagggtggtagaaggcaggatggaaaggtggaagggtaaatggcacagggagaaaaacaaagtgttccaatcagtccaggcacagggactggcaaatgctagaaaatagctgcagaaaaacctgtggtcctttcagactcacggtgatgttaaaaatccacacactggtgtcagggaacattctgccttacgtgcaccagag

SEQ ID NO: 455 - DNA, 350 bp, Homo sapiens
aaatgcactgctggtgtaaataattagcaagcaaaagcgtttctgtgacttcaggtaccagsttaaagagcactagggatggggaacgaatgccaaatcakactccacctagagcaccaggaaacagcttgtaccctggtagggaaatggwgttgctgaaaggggaggctgagccagtgcragactgaacttgtgcagccttagccaagacaaagcagtgtttttcagcagacggctgatgggacaggaattgaagagagaattgactcgtatgaacaggacagggtgaaaatgctgggaattataatgggaaacaaaactatctatgwtcatattttgtaatatttcat

SEQ ID NO: 456 - DNA, 460 bp, Homo sapiens
aaagactaccggatgctggagcaaaccaacttcatgactgcattaacataagctaagttacatacacttcaaatgcagtatagaattaacactgcatatctaaatggctcatatataaaatgtgtaattaaaacccaaacatacacactatgtttattacattcccctacattgaaagtactgagaacaatttaactctgaacacaaaagtttagtgaatttgctactgttccattacaggacaattaaaaatgagactatatcaacttcactagaatttaattgctaaagctaccttatgcacatctattaaactaaaagaaacgactttaaccccttcagttgtttttaagacagcactcctttacagggagtcaggtttggtaaatataaaggatacataaaaaatacagtataaactgcataagcttaacagtagcaaaaacactgatgaactttt

SEQ ID NO: 457 - DNA, 617 bp, Homo sapiens
ccaggctggtctcgaactcctgagctcagcccatctgccgtgctcagcctcccaaagtgctgggattacaggcatgagccaccacgcccagcctcatattgttttgactttccttaaggatagtaatcttaaggaattactattccttgagaatagtaatcaaaatttatccggttaaatagtcttaactgttataaaccatattattttataaagcgtcatttttcttggtcgagcaagtgtatagtattgtcgaaatgaaatttaactgtctgccttctttttactttaagaagtacttctttgggtttttgttttcttcctttcctttgtgtaggccataggaaaaggatacagagtagagtttcatgaacctgaaacttggtggaaatttgatcctgaagaattagaaaagaggaataaacatggtgtgtctcgaaagaagattgctcagatgttggatcgttatgaatatcaaatgtccatttctattgtaatgaattcagtggaaccatcacacaaaagcacacaaagacctcctcctccacaggggagacagaggtggggaggctctcttggctcacataatcgtgtctgtgtcacaaataatcattaaa

SEQ ID NO: 458 - DNA, 538 bp, Homo sapiens
gccctctttgacaagtcctgcagcgaccgtgctatggaaagcacagaatcccgccactaccctgtcttcgagaatcccaaacaaggaaagctccgcaccaaggtggagaacggagaaggcacaatccctgtggaatccagtgacattgtgcctacgtgggatggcattcggctcggggagagactccgtaccatgtcctgtagtgacaaaatcctacgctggaacgtgctgggcctgcaaggggcactgttgacccacttcctgcagcccatttatctcaaatctgtcacattgggttaccttttcagccaagggcatctgacccgtgctatttgctgtcgtgtgacaagagatgggagtgcatttgaggatggactacgacatccctttattgtcaaccaccccaaggttggcagagtcagcatatatgattccaaaaggcaatccgggaagactaaggagacaagcgtcaactggtgtctggctgatggctatgacctggagatcctggacggtaccagaggcactgtggatgggc

SEQ ID NO: 459 - DNA, 490 bp, Homo sapiens
ctgcaggaaacaagtttcacaaaagaagtctacaagaagtacatcaaagattacatgaaatcaatcaaagggaaacttgaagaacagagaccagaaagagtaaaaccttttatgacaggggctgcagaacaaatcaagcacatccttgctaatttcaaaaactaccagttctttattggtgaaaacatgaatccagatggcatggttgctctattggactaccgtgaggatggtgtgaccccatatatgattttctttaaggatggtttagaaatggaaaaatgttaacaaatgtggcaattattttggatctatcacctgtcatcataactggcttctgcttgtcatccacacaacaccaggacttaagacaaatgggactgatgtcatcttgagctcttcatttattttgactgtgatttatttggagtggaggcattgtttttaagaaaaacatgtcatgtaggttgtctaaaaataaaatgcattt

SEQ ID NO: 460 - DNA, 569 bp, Homo sapiens
aaataaggcttggggtttttcccggtcttttggggaacttgaaactgaggtgggactttccagaaactgttgctagtttcgctttatctgagtaccatctgttcttggccctgagccggggcccaggtgctcgaccacagatatcctgtttggcccctgtcccagttttgttcagccttattctttaactaaacttctttgtgacttttgagaactcagctctggtactttttcatgccttgcaaaatggcgttactgcagctagcttgctaagccttatggtggggtctttcattcccccctctttctggaaactgaataaaatcttttattcacgcgattctacttcttctggatctattgatttgagttggtgatactgttgggtcagaaccagggcctgcaccaccgaaattctgtcttttacaaactggaccaagcggttgagaatgcagggtccgaggagtaggattaataaaagtactatcagagggcccataatggtggatatcagggtcgtgaaccatggggacctgttaaacagtccctcaaaccacccttgtcctgat

SEQ ID NO: 461 - DNA, 355 bp, Homo sapiens
ccatctgatctataaatgcggtggcatcgacaaaagaaccattgaaaaatttgagaaggaggctgctgagatgggaaagggctccttcaagtatgcctgggtcttggataaactgaaagctgagcgtgaacgtggtatcaccattgatatctccttgtggaaatttgagaccagcaagtactatgtgactatcattgatgccccaggacacagagactttatcaaaaacatgattacagggacatctcaggctgactgtgctgtcctgattgttgctgctggtgttggtgaatttgaagctggtatctccaagaatgggcagacccgaragcatgcccttctggcttacacactg

SEQ ID NO: 462 - DNA, 531 bp, Homo sapiens
aaatgaaaaaagcctgagggagatgagatattaacctttagttctgataggtttcaaaccctcctgaccaggttttaggatgaggtgagaacagtggcagagagataaaggacaaaaagaagagatgaacaaaactgctacttctcacctccctccagggttcattcagaaaaatgtattaaaggtcatgagcaatctgtgaaacagaaaataaaactttctgataaggaaagctgctcaatattgggatgggctgaatctctttcctagatactcttgttaagtatgaatttttatctgaatgacttctaattcctcctagtaattccagaatctaaatatatataatttaggaacagacaatatattctggattttgtgtaactctcaatgaatttagcaatgtgactacaggcaattaccttaacaattccatctattaaatgttatcttgcattacttaaaagtatttgtatagaagtaaacaaagcttaaagaactgcatatgaaaatactatataatattaaatt

SEQ ID NO: 463 - DNA, 617 bp, Homo sapiens
ccacagtgttcagttccagtggctatcaaggtgaaacagatctcaatgatgcaataacagaagcaggaaagacttatgaagaaattgccagtctcgtggcagaacagccaaagaaagatctccatttcctgatggaatgtaatcacgagtataaaggttttcttggctgcttccctgacatcattggcactcacaagggagcaatagaaaaagtgaaagaaagtgacaaactagttgcaacaagtaaaatcaccctacaagacaaacagaacatggtgaagagagtcagcatcatgtcttacgcgttgcaagctgagatgaatcactttcacagtaaccggatctatgattacaacagtgtcatccgcctgtacctggagcagcaagtgcaattttacgaaacgattgcagaaaagctgaggcaggccctcagccgctttccagtgatgtaggacagaacgggccttgaagagaatgccgcgtgctttctcctgacttggggcaatgcaattcaaaactttttttcccctattattcagaaaaaaaaggaaacaaaaccaaaaagaaagagttgcaaaaaactgcatttattttattagccaccctaaatgcgtcag

SEQ ID NO: 464 - DNA, 558 bp, Homo sapiens
aaataaggcttggggtttttcccggtcttttggggaacttgaaactgaggtgggactttccagaaactgttgctagtttcgctttatctgagtaccatctgttcttggccctgagccggggcccaggtgctcgaccacagatatcctgtttggcccctgtcccagttttgttcagccttattctttaactaaacttccttgtgacttttgagaactcagctctggtactttttcatgccttgcaaaatggcgttactgcagctagcttgctaagccttatggtggggtctttcattcccccctctttctggaaactgaataaaatcttttattcacgcgattctacttcttctggatctattgatttgagttggtgatactgttgggtcagaaccagggcctgcaccaccgaaattctgtcttttacaaactggaccaagcggttgagaatgcagggtccgaggagtaggattaataaaagtactatcagagggcccataatggtggatatcggggtcgtgaaccatggggacctgttaaacagtccctcaaaccacc

SEQ ID NO: 465 - DNA, 463 bp, Homo sapiens
cctgctgctgctgctgctgttgcggctaggggaaccgtcgtggggaaggatggtgtgcgaaaaatgtgaaaagaaacttggtactgttatcactccagatacatggaaagatggtgctagaaataccacagaaagtggtggaagaaagctgaatgaaaataaagctttgacttcaaaaaaagcaagatttgatccatatggaaagaataagttctccacttgtagaatttgtaaaagttctgtgcaccaaccaggttctcattactgccagggctgtgcctacaaaaaaggcatctgtgcgatgtgtggaaaaaaggttttggataccaaaaactacaagcaaacatctgtctagatgtattgatggaatttctggctttctaaatgattttactttctgccttgaattttcaaggcatagatgtcaacttacagaataacatgttttaagataattaagttt

SEQ ID NO: 466 - DNA, 393 bp, Homo sapiens
ccaagctctccatcgtccccgtgcgcagaggctactgggggaacaagatcggcaagccccacactgtcccttgcaaggtgacaggccgctgcggctctgtgctggtacgcctcatccctgcacccaggggcactggcatcgtctccgcacctgtgcctaagaagctgctcatgatggctggtatcgatgactgctacacctcagcccggggctgcactgccaccctgggcaacttcgccaaggccacctttgatgccatttctaagacctacagctacctgacccccgacctctggaaggagactgtattcaccaagtctccctatcaggagttcactgaccacctcgtcaagacccacaccagagtctccgtgcagcggactcaggctccag

SEQ ID NO: 467 - DNA, 543 bp, Homo sapiens
ccttgtttgattttgcgcacttcccggtccatggtgaaggcctcgatgtctaaatgagcatggtaaaggatggtgcctgctggggtctcgtagatacctcgggacttcattccaatgaagcggttctccacgatgtcaatacggcccacgccatgcttgcccgcgacttcgttcaggtacatgaagagctccaaggaggtctggtgggtggtgccatccttgacgttggtcaccttcacagggaccccttttttgaactcgatctcgagaatgtcaggggtgttgggggctttggctgggtcctgggtcttcgtgtagagacctggaggcgcttggtttttggggttctccaggattccagcctcgtagctgatgtgcatgaggttctcatccatgctccacgggttcttgggagtgaccgggatgggaatcccgtgttgctttgcgtactccatcaggtcattgcggcccttgaaccggttgtagaattcaggcatcctccagggagcaatgacctttatctggggggccagtgagtagcar

SEQ ID NO: 468 - DNA, 452 bp, Homo sapiens
ctggcagcccacaccttaccctggagttctgcaactatccttccagcatgagggaccatattgattaccgctgctgcctgcccccagcaacccaccgtcctcatcccaccagcatctgtgacaacttctcggcttatggctggtgccccctgggaccacagtgtcctcagtctcacgatattgaccttatcattgacactgatgaggctgcggcagaggacaagcggcgacggcgacgacgtagggaaaaacggaagagggctttattgaacctaccggggacacagacctctggggaagctaaggatggtcctcccaagaagcaggtctgtggggatagcatcaagcctgaagaaaccgagcaggaggtggctgccgatgaaactaggaacctgcctcactccaagcaaggcaacaaaaatgacttagagatggggattaaggcagcaagg

SEQ ID NO: 469 - DNA, 489 bp, Homo sapiens
aaaaaatgataataaaagtaaacaaatcagcatctttttccccttccctgcttcattaccccctcttccatctatagactttgtcatttttgtctttagaaaagatctgaaggatggtaaagccccgtgctgaaacccagtagagaaacctgtctcaggacacacttgccatctagggctagcttgaaagagcctgaggactgcctttaactgaatttgaattcagcattgtcctttcttcttagtatttgctgcataattgagagcagttcacatcgatttcctggtaggcgtctgcattccctgttgtgttcctgcttctccttcagtagctgcacaacttgcgcagatcgacacactgttgtcacttcattctccccgtctgagaaggatcttgtgttcagttagagtcgtggaaaaatccctgatccttcaaggtcagtcagacagttggcaacattataattaaaaataagaaattaagacttt

SEQ ID NO: 470 - DNA, 670 bp, Homo sapiens
  misc_feature 630: n = A,T,C or G
cctaaacgttcaccaaaaatatgttaacctaggagaaaattgctgggaataaaaacagagaaaaaaatgacataagactgtgatcagcaaaaattccaatggcaaaaacactttaggaaagtaaagcttcctagttgcctttaaggaaaaaaaaaacaaagtgaaatcaaggttcaaggcaaatggtcacttgatgtaccttggatgcaacattttgtctgaagtagagaaatagtaaaatatttcactaagttaaaatatagtttttatattttataccatattgaatacagacataaaaataccagtgtttttctcttgtttcttttcagacaattaagcaaatgttttctttggtgcctgggagtttatcaatatttagggataatggaagataagaactccaagactgacaagcctaaaatagaagattcaaaatcctataccataaaaattacaatcaaaagtggactaaagagaaaaggagcttaaagttatactgcaatagggctgatacatattcttcccccaaatcatactctggctcccaaaataaaaaatactacagcctattgkggttttaatctgkgttttgagatttttttcaaatggaaagatwttacagatwgnaacacatcattctaggtttcaaatcaccaaagtcagtgag

SEQ ID NO: 471 - DNA, 454 bp, Homo sapiens
ccaccaaacaatycgagcagctmcaggcagccatacatacagaccttggggccttasaaaaatcagtcagtgccctagaaaagtctctgacctcgttgtctgaggtggtcctacagaaccggagaggattagatctgctgttcctaaaagaaggaggattatgtgctgccctaaaagaagaatgctgtttctatgcrgaccacactggcgtagtaagggatagcatggmtaakctaasagaaaggctaaaccagaggcaaaaattgttcgaatcargacaagggtggtttgagggactgtttaacakgtccccatggttcacgaccctgatatccaccattatgggccctctgatagtacttttattaatcctactcctcggaccctgcattctcaaccgcttggtccagtttgtaaaagacagaatttcggtggtgcaggccctggttctgac

SEQ ID NO: 472 - DNA, 549 bp, Homo sapiens
  misc_feature 539: n = A,T,C or G
aaataaggcttggggtttttcccggtcttttggggaacttgaaactgaggtgggactttccagaaactgttgctagtttcgctttatctgagtaccatctgttcttggccctgagccggggcccaggtgctcgaccacagatatcctgtttggcccctgtcccagttttgttcagccttattctttaactaaacttccttgtgacttttgagaactcagctctggtactttttcatgccttgcaaaatggcgttactgcagctagcttgctaagccttatggtggggtctttcattcccccctctttctggaaactgaataaaatcttttattcacgcgattctacttcttctggatctattgatttgagttggtgatactgttgggtcagaaccagggtctgcaccaccgaaattctgtcttttacaaactggaccaagcggttgagaatgcagggtccgaggagtaggattaataaaagtactatcagagggcccataatggtggatatcagggtcgtgaaccatggggacctgttnaacagtccct

SEQ ID NO: 473 - DNA, 306 bp, Homo sapiens
aaataaggcttggggtttttcccggtcttttggggaacttgaaactgaggtgggactttccagaaactgttgctagtttcgctttatctgagtaccatctgttcttggccctgagccggggcccaggtgctcgaccacagatatcctgtttggcccctgtcccagttttgttcarccttattctttaactaaacttccttgtgacttttgagaactcarctctggtacttttwcatgccttgcaaaatggcgttactgcarctwgyttgytaagccttatggtggggwctttcattcccccctctt

SEQ ID NO: 474 - DNA, 439 bp, Homo sapiens
aaatgaggcttggggttgatccccggtcatctggggaaccttgagacagtttctgggtctcttgaaactgttgttgttttagctatttctggggaccatctgttcttggccctgggccggggccctagtgcttgaccacagatatcctgtttggccctagtcccggtactttccagcctctctgtacttccttgttcttgtttttctgagaacatcagctctggtattttcccatgccttgcaagatggcgttactgcagttagctggctaagccttatgaaggggtctttcattcccccctctttctgtaaactgaataaaatcttttattcacgtgatttacaatctcctattgtcttaagttgatgatattgttgagtcaraaccagggcctgcactaccgaaatcctgtctttgataaactggaccaggcgattg

SEQ ID NO: 475 - DNA, 402 bp, Homo sapiens
gtgaaggaactcttcaacgagaaatacggtgaggccctgggcctgaaccggccggtgctggtcccttataaactaatccgggacagcccagacgccgtggaggtcacgggtctgcctgatgacatccccttccggaaccccaacacgtacgacatccaccggctggagaagatcctgaaggcccgagagcatgtccgcatggtcatcattaaccagctccaaccctttgcagaaatctgcaatgatgccaaggtgccagccaaagacagcagcattcccaagcgcaagasaaagcgggtctcggaaggaaattccgtctcctcttcctcctcgtcttcctcttcctcgtcctctaacccggattcagcggcatcggccaaccagatctcactcgtgcaatgg

SEQ ID NO: 476 - DNA, 513 bp, Homo sapiens
aaatgaaattttgtcacattctatggaaaatggtttctggtaaactgagaaggatattaaaataagtggcttttttctgggctaccattattgtttgatttctctttgtcaagtgtatagaacctgtcatacattcatgataagtagcactgaaaaattactcattcaaatttcccctgggcacgtaaggcaaaatattgccggttgggatttcaaggtcagtgacgacgcatttcctcccagtacagaccccccagccccccttgctggacatggggaggcagagagtcacttgaccatccagaaatacatgactacaagtcctttatgactgtttgccattttttttaatggtacttagtattttgatcaaactttagtctccagaactaaacaagtccctaagtttccttattttaatttactgtgactagatttgaagcaaataaatactccagatccatgcagctagaacacacttgcttccactactaaatatacagggtatgtcct

SEQ ID NO: 477 - DNA, 580 bp, Homo sapiens
ctgttgcaatcccttaagcatgggtgctattaaaaaaatggtggagaagaaaatacctggaatttacgtcttatctttagagattgggaagaccctgatggaggacgtggagaacagcttcttcttgaatgtcaattcccaagtaacaacagtgtgtcaggcacttgctaaggatcctaaattgcagcaaggctacaatgctatgggattctcccagggaggccaatttctgagggcagtggctcagagatgcccttcacctcccatgatcaatctgatctcggttgggggacaacatcaaggtgtttttggactccctcgatgcccaggagagagctctcacatctgtgacttcatccgaaaaacactgaatgctggggcgtactccaaagttgttcaggaacgcctcgtgcaagccgaatactggcatgaccccataaaggaggatgtgtatcgcaaccacagcatcttcttggcagatataaatcaggagcggggtatcaatgagtcctacaagaaaaacctgatggccctgaagaagtttgkgatggtgaaattcctcaatgattccattgtggac

SEQ ID NO: 478 - DNA, 537 bp, Homo sapiens
aaatgccacgactaggggaaaaagaaactattgaagaaataattgtttagtatatttgcagttggggtagaagaaagaaatctagtatattgattcatatactagtaaattcatctagtataagaacttgtgatgttagattgaagttttgtcatcttataaaagacaacaaacttattttctgtttaagtctgagtgttatggcaatttttagttgattacttatttttcttagccaaattttaattttcttcatattgcattgctctttagttgtctctggaaattctatttactttaaggacatgagaaattcaaatgagagaagttgctgatattcatcagtgtgtttggacagttcatagggtccacaaatcaaatgaggttgtttcctgaagtagaagaaaacagaactttgcaattgatactgaagtactttgccatggagttagtaactcctgagcagaccattttagatggctcagcatttggcaggaagacttctccattccctgcttatatctatggaaggatcag

SEQ ID NO: 479 - DNA, 570 bp, Homo sapiens
  misc_feature 551: n = A,T,C or G
aaataaggcttggggtttttcccggtcttttggggaacttgaaactgaggtgggactttccagaaactgttgctagtttcgctttatctgagtaccatctgttcttggccctgagccggggcccaggtgctcgaccacagatatcctgtttggcccctgtcccagttttgttcagccttattctttaactaaacttccttgtgacttttgagaactcagctctggtactttttcatgccttgcaaaatggcgttactgcagctagcttgctaagccttatggtggggtctttcattcccccctctttctggaaactgaataaaatcttttattcacgcgattctacttcttctggatctattgatttgagttggtgatactgttgggtcagaaccagggcctgcaccaccgaaattctgtcttttacaaactggaccaagcggttgagaatgcagggtccgaggagtaggattaataaaagtactatcagagggcccataatggtggatatcagggtcgtgaaccatggggacctgttaaacagtccctcnaaccacccttgtcctgatt

SEQ ID NO: 480 - DNA, 547 bp, Homo sapiens
agaaagtggaagagcctgagcagcaaaataaatcatcagcagttgggccacctgaaaaagtgagacggtttactctggatagacttaagcaactgggagtagatgtttccattaaaccacggctaggtgctgatgaagattcctttgtgatacttgaacctgaaaccaacagagaactggaagccttgaagcagcgtttctggaagcatgctaatccagcagccaaacccagggcgggtcagacagtgaatgtgaacgtcatagtgaaagacatgggcactgatggaaaggaagagctaaaagcagatgtggtacctgtgactttagcacctaagaagttggatggagcaagccacacaaaaccaggtgaaaagcttcaggtgttaaaagctaaactgcaagaagcaatgaaactccgaaggtttgaggagcgccagaagcgccaagcactgtttcctcgcaggctcagcattacttcctccactgaagcccccagtaatggcgtgacccaatgtgtgccccacagcagagcccacagccacgccag

SEQ ID NO: 481 - DNA, 454 bp, Homo sapiens
aaaatggattccactgagccaccctacakccagaakagatatgaggaaattgttaaggaagtmarcacttacattaagaaaattggctacaaccscsgacacagtagcatttgtgccaatttstggtkggaatggtgacaacatgctggarccaagtgctaacatgccttggttcaagggatggaaagtcacccgtaaggatggcaatgtcagtggaaccacgctgcttgaggctctggactgmatcctaccaccaactcgtycaactgacaagcccttgckcctgcctmtscaggatgtctacaaaattggtggyattggtactgttcctgttggmcgagtggagactggtgttctcmaacccsgtatggtggtcaccttkgctccartcawcgttwcaacggaagtaaaatctgtcgaaakgcaccatgaagctttgagtgaagctctttst

SEQ ID NO: 482 - DNA, 219 bp, Homo sapiens
actactttgattacaaggagcagctccccgagtcagcctatatgcaccagctcttgggcctcaacctcctcttcctgctgtcccagaaccgggtggctgagttccacacggagttggagcggctgcctgccaaggacatacagaccaatgtctacatcaagcacccagtgtccctggagcaatacctgatggagggcagctacaacaaagtgttcctgg

SEQ ID NO: 483 - DNA, 181 bp, Homo sapiens
ctgggatgcccccaaagtttggggactaagactctaccgatccacgggggccgacccggtgacccggttctctttgacccgccaggtcctcaatgtaggaccccgcgtccccattgggcctaatcccgtgatcactgaacagctacccccctcccaacccgtgcagatcatgctccccagg

SEQ ID NO: 484 - DNA, 253 bp, Homo sapiens
ccttttcttacatggctctggtccgaggtccagtactcagcatgcgaagagccatatcacggaggggataagtggaggagtgtcttttcaattacttgggtgtgaccctgaagactcggatgtggatggctgagttgttgcggatccgagtcagtggctcccgtgtgtcggtctctggctccagctcatcaacaagctccacggtggaggtattggcagccacctgcaaggacccgaagctgcccgcctgcag

SEQ ID NO: 485 - DNA, 480 bp, Homo sapiens
caacaatattgtacgctgcatagtgcactcccccaccaaccccgggttcatgacgtgcagcgatgacttcagagcgcggttttggtaccggagatcgaccactgactgagccaccctctccgtagggttctttctcgaggactctaccctcctcccccacgtcctgtctcagtgcgagatagtagtagggttgtggtgctggagtttaagttgagtagtaggaatgcggtagtagttaggataatataaatagttaaattaagaatggttatgttagggttgtacggtagaactgctattattcatcctatgtgggtaattgaggagtatgctaagattttgcgtarctgggtttggtttaatccacctcaactgcctgctatgatggataagattgagagagtgaggagaaggcttacgtctagtgagggagagatttggtatatgattgagmtgggggctagwttttgtcatgtgaga

SEQ ID NO: 486 - DNA, 367 bp, Homo sapiens; identical to SEQ ID NO: 372

SEQ ID NO: 487 - DNA, 599 bp, Homo sapiens
ccaccaaacaattcgagcagctccaggcagccatacatacagaccttggggccttagaaaaatcagtcagtgccctagaaaagtctctgacctcgttgtctgaggtggtcctacagaaccggagaggattagatctgctgttcctaaaagaaggaggattatgtgctgccctaaaagaagaatgctgtttctatgcagaccacactggcgtagtaagggatagcatggctaagctaagagaaaggctaaaccagaggcaaaaattgttcgaatcaggacaagggtggtttgagggactgtttaacaggtccccatggttcacgaccctgatatccaccattatgggccctctgatagtacttttattaatcctactcctcggaccctgcattctcaaccgcttggtccagtttgtaaaagacagaatttcggtggtgcaggccctggttctgacccaacagtatcaccaactcaaatcaatagatccagaagaagtagaatcgcgtgaataaaagattttattcagtttccagaaagaggggggaatgaaagaccccaccataaggcttagcaagctagctgcagtaacgccattttgc

SEQ ID NO: 488 - DNA, 433 bp, Homo sapiens
aaaatccctcaaaaactgtttattatacaagtgagttttgagtcacgatgggcttatcggtaggatttctggtagcgagcgcgggcaccagggcctccaaactttttggactcgcagcgacgagggtcagctaccagcagggtccggtcatactggatgaggatgtctttgatctccttcttggaagcctcatccgcatatttctggtaataggccaccagggctttggagatggactgacggatagcataaatctgggccacgtgaccaccaccctttacacggacacggatgtctacaccagcaaatcgctccttgccgagaagcagaactggctccagcagcttgtactgtagcgtgcgcggctcaatcatctccaggggccgcccgttcaccttgatgagaccattgccgcgtttgcagtgcgccacag

SEQ ID NO: 489 - DNA, 398 bp, Homo sapiens
aaaattgtgcagatggtataatgaaaattctctgtaaaatctaggtagtaaagtggttaacgtataatttgatttttgttgtgtaacaatttgtgattcaaaaactttgtattttgacagatgatcttccaaaacccaagactactgaagtaattaggaaaggctcaattactgaatacacagcagcagaggaaaaagaagatggacgacgctggcgtatgttcaggattggagaacaggaccacagggttgatatgaaggcaattgaaccctataaaaaagttatcagccatgggggatattatggggatggattaaatgccattgttgtgtttgctgtctgtttcatgcctgaaagtagtcagcctaactatagatacctgatggacaatcttttt

SEQ ID NO: 490 - DNA, 310 bp, Homo sapiens
ccaccaaacaattcgagcagctccaggcagccatacatacagaccttggggccttagaaaaatcagtcagtgccctagaaaagtctctgacctcgttgtctgaggtggtcctacagaaccggagaggattagatctgctgttcctaaaagaaggaggattatgtgctgccctaaaagaagaatgctgtttctatgcagaccacactggcgtagtaagggatagcatggctaagctaagagaaaggctaaaccagaggcaaaaattgttcgaatcaggacaagggtggtttgagggactgtttaacaggtc

SEQ ID NO: 491 - DNA, 524 bp, Homo sapiens
ccaccaaacaattcgagcagctccaggcagccatacatacagaccttggggccttagaaaaatcagtcagtgccctagaaaagtctctgacctcgttgtctgaggtggtcctacagaaccggagaggattagatctgctgttcctaaaagaaggaggattatgtgctgccctaaaagaagaatgctgtttctatgcagaccacactggcgtagtaagggatagcatggctaagctaagagaaaggctaaaccagaggcaaaaattgttcgaatcaggacaagggtggtttgagggactgtttaacaggtccccatggttcacgaccctgatatccaccattatgggccctctgatagtacttttattaatcctactcctcggaccctgcattctcaaccgcttggtccagtttgtaaaagacagaatttcggtggtgcaggccctggttctgacccaacagtatcaccaactcaaatcaatagatccagaagaagtagaatcgcgtgaataaaagatttattca

SEQ ID NO: 492 - DNA, 608 bp, Homo sapiens
ccaccaaacaattcgagcagctccaggcagccatacatacagaccttggggccttagaaaaatcagtcagtgccctagaaaagtctctgacctcgttgtctgaggtggtcctacagaaccggagaggattagatctgctgttcctaaaagaaggaggattatgtgctgccctaaaagaagaatgctgtttctatgcagaccacactggcgtagtaagggatagcatggctaagctaagagaaaggctaaaccagaggcaaaaattgttcgaatcaggacaagggtggtttgagggactgtttaacaggtccccatggttcacgaccctgatatccaccattatgggccctctgatagtacttttattaatcctactcctcggaccctgcattctcaaccgcttggtccagtttgtaaaagacagaatttcggtggtgcaggccctggttctgacccaacagtatcaccaactcaaatcaatagatccagaagaagtagaatcgcgtgaataaaagattttattcagtttccagaaagaggggggaatgaaagaccccaccataaggcttagcaagctagctgcagtaacgccattttgcaaggcatga

SEQ ID NO: 493 - DNA, 414 bp, Homo sapiens
aaacacatacccatcaacgacaagattggggaagtgaatggcttggaggcatttgcatagaagtggaagcactaggtgggcggacataaagacgacaatggcagttctcgatattcacgatcacggctttgaagtcccggtcaacctgcccctctctgtccccggcattcattgacacgggctttccctggcctgggatcccatcccaacacacacgacagaaaacagtgcaaaataataacacaaatgccaaatgtacacagtgtacaactctgaactgagaaagtgcaaggagaccacgggaatggaagtgggtaggggtcgggaggatgggcaccaggctggtgtcctgacagccacacctgggtgcaggccacgtgtcctcacgaccaaggtaaccgggtgtstcaggca

SEQ ID NO: 494 - DNA, 147 bp, Homo sapiens
aaataaggcttggggtttttcccggtcttttggggaacttgaaactgaggtgggactttccaraaactgttgctagtttcgctttatctgagtaccatctgttcttggccctgagccggggcccadgtgctcgaccacwgatatcct

SEQ ID NO: 495 - DNA, 362 bp, Homo sapiens
cctgctgggaacgggacttctaaaaggaactatgtctggaaggctgtggtccaaggccatttttgctggctataagcggggtctccggaaccaaagggagcacacagctcttcttaaaattgaaggtgtttacgcccgagatgaaacagaattctatttgggcaagagatgcgcttatgtatataaagcaaagaacaacacagtcactcctggcggcaaaccaaacaaaaccagagtcatctggggaaaagtaactcgggcccatggaaacagtggcatggttcgtgccaaattccgaagcaatcttcctgctaaggccattggacacagaatccgagtgatgctgtacccctcaaggattt

SEQ ID NO: 496 - DNA, 612 bp, Homo sapiens
  misc_feature 601: n = A,T,C or G
ccaccaaacaattcgagcagctccaggcagccatacatacagaccttggggccttagaaaaatcagtcagtgccctagaaaagtctctgacctcgttgtctgaggtggtcctacagaaccggagaggattagatctgctgttcctaaaagaaggaggattatgtgctgccctaaaagaagaatgctgtttctatgcagaccacactggcgtagtaagggatagcatggctaagctaagagaaaggctaaaccagaggcaaaaattgttcgaatcaggacaagggtggtttgagggactgtttaacaggtccccatggttcacgaccctgatatccaccattatgggccctctgatagtacttttattaatcctactcctcggaccctgcattctcaaccgcttggtccagtttgtaaaagacagaatttcggtggtgcaggccctggttctgacccaacagtatcaccaactcaaatcaatagatccagaagaagtagaatcgcgtgaataaaagattttattcagtttccagaaagaggggggaatgaaagaccccaccataaggcttagcaagctagctgcagtaacgccattttgcanggcatgaaaag

SEQ ID NO: 497 - DNA, 316 bp, Homo sapiens; identical to SEQ ID NO: 382

SEQ ID NO: 498 - DNA, 452 bp, Homo sapiens
ccattaaaagttatttacaacagtgggagaaaaaaagacaagaagttgtttcacattacagacctccccccaccccaaagcctaatacttgcttaccaagtcaaaaaagagacacagttgattcacaggctggaggtttgaacttgagtaagacatttataaaaacctagacggggcagtgtcctccccagcccaggtgccactaggcacagcacaagagactaaaaacaacaggggaaggctggacactcaaggtttgggagtataagcaccccacttctggctcagggatttggggagtagggtaaacaaaacctacttggaaaagaattggggaagaaaaccaacaactgccttatgcaggggtggggacagggaaggaggtagggccagggacaggagcatttcacatcactaacctaacttgggaagctgtaagggaccatcttcaa

SEQ ID NO: 499 - DNA, 506 bp, Homo sapiens
ctggtgcctatgctaggcttgtcctgagaacatccctcagtaacttgatattcacatgacctacaggatgtcccatctgcagggctgagtcagttggggaacaccagaggctacacagtagcccttcctgctactcggttaatgagcttggcaggttctttgtctcactgaattcttatcatggaaacagcagcagcagccgctaggaaatcttcaagtgtagtgtctgtgctaacccagtggtaaatcccttagatcccctgctggtctctggcagtctccttgattttgggtaccatgtatattttccgctttgactttaacgctttctaggatagggtaagcacccttaattcaggcactgtccattagcttcctttgcaaaggctacttatggccggtcacaatccagcactcagacagagccaaggcaatatcctcttgcccatggctatgatgtcagacagtggatgggctccagcaacaagagacaaaataactaaagg

SEQ ID NO: 500 - DNA, 521 bp, Homo sapiens
aaataaggcttggggtttttcccggtcttttggggaacttgaaactgaggtgggactttccagaaactgttgctagtttcgctttatctgagtaccatctgttcttggccctgagccggggcccaggtgctcgaccacagatatcctgtttggcccctgtcccagttttgttcagccttattctttaactaaacttctttgtgacttttgagaactcagctctggtactttttcatgccttgcaaaatggcgttactgcagctagcttgctaagccttatggtggggtctttcattcccccctctttctggaaactgaataaaatcttttattcacgcgattctacttcttctggatctattgatttgagttggtgatactgttgggtcagaaccagggcctgcaccaccgaaattctgtcttttacaaactggaccaagcggttgagaatgcagggtccgaggagtaggattaataaaagtactatcagagggcccataatggtggatatcagggtcgtg

SEQ ID NO: 501 - DNA, 542 bp, Homo sapiens; identical to SEQ ID NO: 400

SEQ ID NO: 502 - DNA, 527 bp, Homo sapiens
aaataaggcttggggtttttcccggtcttttggggaacttgaaactgaggtgggactttccagaaactgttgctagtttcgctttatctgagtaccatctgttcttggccctgagccggggcccaggtgctcgaccacagatatcctgtttggcccctgtcccagttttgttcagccttattctttaactaaacttccttgtgacttttgagaactcagctctggtactttttcatgccttgcaaaatggcgttactgcagctagcttgctaagccttatggtggggtctttcattcccccctctttctggaaactgaataaaatcttttatttacgcgattctactttttctggatctattgatttgagttggtgatactgttgggtcagaaccagggcctgcaccaccgaaattctgtcttttacaaactggaccaagcggttgagaatgcagggtccgaggagtaggattaataaaagtactatcagagggcccataatggtggatatcagggtcgtgaaccat

SEQ ID NO: 503 - DNA, 527 bp, Homo sapiens
  misc_feature 481: n = A,T,C or G
tcagcgcctcggctccagcgccatggcgccctccaggaagttcttcgttgggggaaactggaagatgaacgggcggaagcagagtctgggggagctcatcggcactctgaacgcggccaaggtgccggccgacaccgaggtggtttgtgctccccctactgcctatatcgacttcgcccggcagaagctagatcccaagattgctgtggctgcgcagaactgctacaaagtgactaatggggcttttactggggagatcagccctggcatgatcaaagactgcggagccacgtgggtggtcctggggcactcaragagaaggcatgtctttggggagtcagatgagctgattgggcagaagtggcccatgctctggcagagggactcggagtaatcgcctgcattggggagaaactagatgaaagggaagctggcatcactgagaaggttgttttcgagcagacaaaggtcatcgcagatnacgtgaaggactggagcaaggtcgtcctggcctatgagcctgtgtg

SEQ ID NO: 504 - DNA, 412 bp, Homo sapiens
cgcgcacaccatgacgaagaacgagaagaagtccctcaaccagagcctggccgagtggaagctcttcatctacaacccgaccaccggagaattcctggggcgcaccgccaagagctggggtttgatcttgctcttctacctagttttttatgggttcctggctgcactcttctcattcacgatgtgggttatgcttcaractctcaacgatgaggttccaaaataccgtgaccagattcctagcccaggactcatggtttttccaaaaccagtgaccgcattggaatatacattcagtaggtctgatccaacttcgtatgcrgggtacattgaagaccttaakaagyttctaaaaccatatactttagaagaacagaagaacctcacagtctgtcmtgatggagcacttttt

SEQ ID NO: 505 - DNA, 339 bp, Homo sapiens
aaaatattcagaaacttgtattaactggaacccctgcttacaacctcaggtggagggggcttgatggtgactggctggggagtcctccggggtggggagggctttggctgcacctgctgctgggcggggttatagtaggtcactcctccatatacctgtgatggggcctgtgtattaggatacagatgaggcggtggtgggggaggcagtgcccctggagcataagggtaactgggattaccaaagttcatgacgcctggagcagaaaagtaagtaggagcaagcaactgctgaggtggtggctgtcctggagacatggacactggtgggggatagagg

SEQ ID NO: 506 - DNA, 603 bp, Homo sapiens
aaataaggcttggggtttttcccggtcttttggggaacttgaaactgaggtgggactttccagaaactgttgctagtttcgctttatctgagtaccatctgttcttggccctgagccggggcccaggtgctcgaccacagatatcctgtttggcccctgtcccagttttgttcagccttattctttaactaaacttctttgtgacttttgagaactcagctctggtactttttcatgccttgcaaaatggcgttactgcagctagcttgctaagccttatggtggggtctttcattcccccctctttctggaaactgaataaaatcttttattcacgcgattctacttcttctggatctattgatttgagttggtgatactgttgggtcagaaccagggcctgcaccaccgaaattctgtcttttacaaactggaccaagcggttgagaatgcagggtccgaggagtaggattaataaaagtactatcagagggcccataatggtggatatcagggtcgtgaaccatggggacctgttaaacagtccctcaaaccacccttgtcctgattcgaacaatttttgcctctggtttagcctttctc

SEQ ID NO: 507 - DNA, 582 bp, Homo sapiens
aaataaggcttggggtttttcccggtcttttggggaacttgaaactgaggtgggactttccagaaactgttgctagtttcgctttatctgagtaccgtctgttcttggccctgagccggggcccaggtgctcgaccacagatatcctgtttggcccctgtcccagttttgttcagccttattctttaactaaacttccttgtgacttttgagaactcagctctggtactttttcatgccttgcaaaatggcgttactgcagctagcttgctaagccttatggtggggtctttcattcccccctctttctggaaactgaataaaatcttttattcacgcgattctacttcttctggatctattgatttgagttggtgatactgttgggtcagaaccagggcctgcaccaccgaaattctgtcttttacaaactggaccaagcggttgagaatgcagggtccgaggagtaggattaataaaagtactatcagagggcccataatggtggatatcagggtcgtgaaccatggggacctgttaaacagtccctcaaaccacccttgtcctgattcgaacaattttt

SEQ ID NO: 508 - DNA, 548 bp, Homo sapiens
ccaccaaacaattcgagcagctccaggcagccatacatacagaccttggggccttagaaaaatcagtcagtgccctagaaaagtctctgacctcgttgtctgaggtggtcctacagaaccggagaggattagatctgctgttcctaaaagaaggaggattatgtgctgccctaaaagaagaatgctgtttctatgcagaccacactggcgtagtaagggatagcatggctaagctaagagaaaggctaaaccagaggcaaaaattgttcgaatcaggacaagggtggtttgagggactgtttaacaggtccccatggttcacgaccctgatatccaccattatgggccctctgatagtacttttattaatcctactcctcggaccctgcattctcaaccgcttggtccagtttgtaaaagacagaatttcggtggtgcaggccctggttctgacccaacagtatcaccaactcaaatcaatagatccagaagaagtagaatcgcgtgaataaaagattttattcagtttccagaaagaggggggaatg

SEQ ID NO: 509 - DNA, 548 bp, Homo sapiens
ccaccaaacaattcgagcagctccaggcagccatacatacagaccttggggccttagaaaaatcagtcagtgccctagaaaagtctctgacctcgttgtctgaggtggtcctacagaaccggagaggattagatctgctgttcctaaaagaaggaggattatgtgctgccctaaaagaagaatgctgtttctatgcagaccacactggcgtagtaagggacagcatggctaagctaagagaaaggctaaaccagaggcaaaaattgttcgaatcaggacaagggtggtttgagggactgtttaacaggtccccatggttcacgaccctgatatccaccattatgggccctctgatagtacttttattaatcctactcctcggaccctgcattctcaaccgcttggtccagtttgtaaaagacagaatttcggtggtgcaggccctggttctgacccaacagtatcaccaactcaaatcaatagatccagaagaagtagaatcgcgtgaataaaagattttattcagtttccagaaagaggggggaatg

SEQ ID NO: 510 - DNA, 529 bp, Homo sapiens
aaaaaaaaaaaagcaaagctttctgccagactgagggtgccttttggggggtgggagaaatgaactgacagataaacagtaactcagcgtaagtgacctgtggatcatcagtagtacccaagcatggtcctgaacagtgtattagcagagctttagtttatctcagtcctggatgggagagagagggaggagtaaaactgggcaagacaaagagccctggatcgttgaattgatagtttaatttctgctgttggctgttaataatttggattatttatgtttataaatgatacagatctgtttacaaggtttgtagatactttttttgttcctgttcatagatgggaagcttccttataactgatgcagagaaaaattagtccttcaaatactgctgtattttcaggaaaaaaaaaaggggtgtttctattgaaactgtactaaatttttgcctacaatttaccttgttaaatattgtagataaattgctaatactaatagccaaatagataacactaatgctttgttt

SEQ ID NO: 511 - DNA, 212 bp, Homo sapiens
ctgacctttcccttccttgccctcatcttgctgccagggtctgcaggtttgtcaccgtcccggccccagtctgaaacatgggattatttcasaattggaggtggcagcttcaraaaaaaatccttctcgtgtgttgactgctgagatccaggaactgggaaatcaacccccagttbgtagattgctctctttggaaattctgtggcccaacc

SEQ ID NO: 512 - DNA, 565 bp, Homo sapiens
ccaccaaacaattcgagcagctccaggcagccatacatacagaccttggggccttagaaaaatcagtcagtgccctagaaaagtctctgacctcgttgtctgaggtggtcctacagaaccggagaggattagatctgctgttcctaaaagaaggaggattatgtgctgccctaaaagaagaatgctgtttctatgcagaccacactggcgtagtaagggatagcatggctaagctaagagaaaggctaaaccagaggcaaaaattgttcgaatcaggacaagggtggtttgagggactgtttaacaggtccccatggttcacgaccctgatatccaccattatgggccctctgatagtacttttattaatcctactcctcggaccctgcattctcaaccgcttggtccagtttgtaaaagacagaatttcggtggtgcaggccctggttctgacccaacagtatcaccaactcaaatcaatagatccagaagaagtagaatcgcgtgaataaaagattttattcagtttccagaaagaggggggaatgaaagaccccaccataag

SEQ ID NO: 513 - DNA, 500 bp, Homo sapiens
aaaatacgattgtcaaattgggaaaatgaaataaacacagtaaaataaactgtacaaaggcaaagtagaataacaaaaaatattttactaaaacataagatttacagaagtttccagacaagccatacaaaatggtcacaagctttttttgaaggggggaatctacacttgacagcaatgttattagtgagggctgtgatgtttgtttaatgttcccattttggtcccaacaatcaagcttgtccatctacagcgtctaaataaagttagacttggctagagcatattctaaagacctggttagctgcttttaaccaatgcaattagatcaccaaaaagggggaaaggagcccataaaattaaactacctcccccctcaaaaataaaataaaataaaataaaataaaaacacccacacccctgcagctaacctgacaactaccttcattcacagtgctttatacttaaaccaggatgggggaaatgaataaaagcaggga

SEQ ID NO: 514 - DNA, 588 bp, Homo sapiens
  misc_feature 582: n = A,T,C or G
ctggatctataaatcattttccatatattatcacatattcaggaaagtttctgagatgatatatcaagacaggcttctcttgtgactcaactggacttcaaatagtctctttagaagtctgagtaatggtgcaacctatacatcagggccttgcccttttcattccccaaggcaaagtatccacttctcggagaaaaatccatggtatgaacatgagaaatattcttatttttaatgactgggaagtttgaaaatactgtacaggaaggaagatgaaccaatctgactgcttctttcattttttctgaagcaattgccaagatttctgtagtaggattgaaggtcagagaagtaacacctgtaaccaagttcattatagcttttattggctttgggtttgtttcttggagacaagaatcttgattgtatatatttaccactccacaattagaaccacaagcaacatactgtccattcctagatgtggcaatgcttaatccatataaactgccttcatcaacaaatctgttaaggcacttccttgagttcacatcccaaacataaacttctccatcccccgangaggcg

SEQ ID NO: 515 - DNA, 429 bp, Homo sapiens
aaatgttagcaaattgtggcaagaggaaaacaaacagtggagaaaactgtggtagagaaagtaaagaaggggcaggagaaagctgtaattataacctgggcctgcctttgttctcatgaagccaggggcctctccatatcctatacttgctcttacgctaataacaaaccaaatgctgcaaaataaaagtaataatgacccaaactaatttaagtcttttgtttaaggagtaaatgagagaaacattttagcttcttaatcaaggagtgctataatttcagggcatcttaatataattcacttaccctaaagcaattgtgcaataagcaaattataaaaggaaaacaacaaaggttaactttctacaggggccaatagacaagatctgtggagcacagcaattaaccttcacatactggagtcttgttt

SEQ ID NO: 516 - DNA, 255 bp, Homo sapiens
aaatgactataaaaatgtgcagatcagtgccaaattttttggcaaaggctgaatggcagacagtaatccaagacgcagacaaccttgcttttaagccatccgttacacagagaccagcaggctcccttctacctgtgagaccaaataatcccaaaatgtaaccaaataatcataactccccctactcctaaaacctacccttcacccttcactgtctacgtcagcctctggacagacctgatgcctggggtttgg

SEQ ID NO: 517 - DNA, 245 bp, Homo sapiens
ctgtcttccctactgtgggaggggacatgggcctgcacagcggtttattcagggatgaaacctaagctatgtgcagggtccctgggttgctgagagagaccgggcaagccttcccctcccactgcctgcaraatgaaggggaataattaaagactattaaaggaaattaaactccaccttcadagataacctaattwcctcccaacacacacaccctcttctaacgtctggccccctacccctgc

SEQ ID NO: 518 - DNA, 281 bp, Homo sapiens
ctggctagaacagtccccctacctggggccatgccctcctgcaggccacagtgctgctggggccccacagtgggcgtccatgtttgagaccctgagcaatgcccaccagacagaggctgacccagttggaggctatctccaactcctgaatgccccaaaacctccaagttcttcagatataagaacttgtctctctgccgtcccaactggggagacaagggcctggaagagggaatgtcagtccacctttattgggcgaaaccctgcagtgtaactgtttt

SEQ ID NO: 519 - DNA, 424 bp, Homo sapiens
ccacagtgttcagttccagtggctatcaaggtgaaacagatctcaatgatgcaataacagaagcaggaaagacttatgaagaaattgccagtctcgtggcagaacagccaaagaaagatctccatttcctgatrkaatgtaatcacgagtataaaggttttcttggctgcttccctgacatcattggcactcacaagggagcaatagaaaaagtgaaagaaagtgacaaactagttgcaacaagtaaaatcaccctacaagacaaacagaacatggtgaagagagtcagcatcatgtcttacgcgttgcaagctgagatgaatsactttcacagtaaccggatctatgattacaayagdtgtcatccgcctgtacctgragcagcaagtgcaattbtacgaaacgattgcagaaaagctgaggc

SEQ ID NO: 520 - DNA, 454 bp, Homo sapiens
ccactgatgcccagcttcccccaacaccccaacacaggcccaggacaatattacaaaagtgaacaaatgcaacctttttctgcttttacaaatgacatgtctccatccccggccagcaggggtaggggaggccggttgaaagcgacactccgttaaaaaggcaacaacttttataaaatgaagactaaggaaacagcccagggttcggaagctgagatgctaccctgggggtagagcatagacatgggtcgggcagaccttgtctcctttcacggcattcctgggagggtaagaagggctgtcgtgctcagggccagtggggactgaatccaggaggccccttggagatcccagccagatgaggctccagaactgcagcaactccttggggcagcatctagaggatgctcaggggaaaatgggtaggtttccagtctggatgctgggggacccc

SEQ ID NO: 521 - DNA, 559 bp, Homo sapiens
cctgtccagtctttgaaaacatcaagagatacttcaccctcaagtggttcagcagtttcttcatcaaaggtgttagacaaacccagtaggctaactgaaaaggaacttgctgaggctgcaagcaagtgggctgctgaaaagctagagaaatcagatgaaagtaacttgcctgaaatttctgagtatgaggcgggatccacagcaccattgtttactgaccagccagaggaacctgagtcaaacacaacacatgggatagaattatttgaagatagtcagctaaccactcgctctaaagcaatagcatcaaaaaccaaagagattgaacaggtttaccgacaagactgtgaaactttcgggatggtggtgaaaatgctgattgaaaaagatccttcattagaaaagtctatacagtttgcattgaggcagaatttacatgaaataggtgagcggtgtgttgaagaactcaagcatttcattgcagagtatgatacttccactcaagattttggagagcctttttagatttttctgctcaggctaaaaaaaaaacagwttc

SEQ ID NO: 522 - DNA, 509 bp, Homo sapiens
aaaaatccttttaattttatctagggataaccactcacatcatggctaagttgcaaggaacttcaaaactttgaaaaagaatttcatccctgagaagtgagagatagaaaaatatctaaaaaaagagaagcaacagtcttgcacccttttaacaatctcaccacagcatgaactactattaacactgagcaatcagatattccagtcctggagagttactgcctttcatgatctgatcttttgtaatgaaactacaagtgcaacattaaaaaaaaacagataaatagaaaccctggttttattttcagctttacatttttgacaagtgcaaggtcagccagctaagatataaatattccaataatgaccaaagtaataacttctactggcatgtcctcttctgagtctccattttctccactgatattcatccaaataataaaagtaacacaattgcaatttgagtttactattatcaatggcactctcatcacggttcttacagatcg

SEQ ID NO: 523 - DNA, 100 bp, Homo sapiens
ctgcttaactctcccgaaactaaacttgagcctccattatggcatgctgaatttaccaaagaagaattggttcagaagctcagttccaccacaaaaagtg

SEQ ID NO: 524 - DNA, 573 bp, Homo sapiens
  misc_feature 527: n = A,T,C or G
ccaccaaacaattcgagcagctccaggcagccatacatacagaccttggggccttagaaaaatcagtcagtgccctagaaaagtctctgacctcgttgtctgaggtggtcctacagaaccggagaggattagatctgctgttcctaaaagaaggaggattatgtgctgccctaaaagaagaatgctgtttctatgcagaccacactggcgtagtaagggatagcatggctaagctaagagaaaggctaaaccagaggcaaaaattgttcgaatcaggacaagggtggtttgagggactgtttaacaggtccccatggttcacgaccctgatatccaccattatgggccctctgatagtacttttattaatcctactcctcggaccctgcattctcaaccgcttggtccagtttgtaaaagacagaatttcggtggtgcaggccctggttctgacccaacagtatcaccaactcaaatcaatagatccagaagaagtagaatcgcgtgaataaaagattttattcagntttccagaaagaggggggaatgaaagaccccaccataaggcttagc

SEQ ID NO: 525 - DNA, 558 bp, Homo sapiens
tctatgggccggacacccccatcatttcccccccagactcgtcttacctttcgggagcgaacctcaacctctcctgccactcggcctctaacccatccccgcagtattcttggcgtatcaatgggataccgcagcaacacacacaagttctctttatcgccaaaatcacgccaaataataacgggacctatgcctgttttgtctctaacttggctactggccgcaataattccatagtcaagagcatcacagtctctgcatctggaacttctcctggtctctcaggtcccgcgggtctgtctcttgcttcaacagtgtttggacggaacagatccggggactctcttccagcctccgaccgccctccgatttcctctccgcttgcaacctccgggaccatcttctcggccatctcctgcttctgggacctgtcagcaccgtttttgtggttagctccttcttgccaaccaaccatgagctcccagattcgtcagaattattccaccgacgtggaggcagccgtcaacagcctggtcaatttgtacctgcaggacctgc

SEQ ID NO: 526 - DNA, 433 bp, Homo sapiens
ctgtggcgcactgcaaacgcggcaatggtctcatcaaggtgaacgggcggcccctggagatgattgagccgcgcacgctacagtacaagctgctggagccagttctgcttctcggcaaggagcgatttgctggtgtagacatccgtgtccgtgtaaagggtggtggtcacgtggcccagatttatgctatccgtcagtccatctccaaagccctggtggcctattaccagaaatatgtggatgaggcttccaagaaggagatcaaagacatcctcatccagtatgaccgaaccctgctggtagctgaccctcgtcgctgcgagtccaaaaagtttggaggccctggtgcccgcgctcgctaccagaaatcctaccgataagcccatcgtgactcaaaactcacttgtataataaacagtttttgagggatttt

SEQ ID NO: 527 - DNA, 327 bp, Homo sapiens
ccatcatcttcatcctcaccgcagccctttcctatgtgctgtgcaagaggaggagggggcagtcaccgcagtcctctccagatctgccggttcattatatacctgtggcacctggctctaatacctgagccaagaatggaagcttgtgaggagacggactctatgttgcccaggctgttatggaactcctgagtcaagtgatcctcccaccttggcctctgaaggtgtgaggattataggcgtcacctaccacatccagcctacacgtatttgttaatatctaacataggactaaccagccactgccctctcttaggcccctcattt

SEQ ID NO: 528 - DNA, 550 bp, Homo sapiens
aaataaggcttggggtttttcccggtcttttggggaacttgaaactgaggtgggactttccagaaactgttgcmdgtttcgctttatctgagtaccatctgttcttggccctgagccggggcccaggtgctcgaccacagatatcctgtttggcccctgtcccagttttgttcagccttattctttaactaaacttccttgtgacttttgagaactcagctctggtactttttcatgccttgcaaaatggcgttactgcagctagcttgctaagccttatggtggggtctttcattcccccctctttctggaaactgaataaaatcttttatttacgcgattctactttttctggatctattgatttgagttggtgatactgttgggtcaraaccagggcctgcaccaccgaaattctgtcttttacaaactggaccaagcggttgagaatgcagggtccgaggagtaggattaatwaaagtactatcagagggcccataatggtggatatcagggtcgtgaaccatggggacctgttaaacagtctctc

SEQ ID NO: 529 - DNA, 570 bp, Homo sapiens
aaataaggcttggggtttttcccggtcttttggggaacttgaaactgaggtgggactttccagaaactgttgctagtttcgctttatctgagtaccatctgttcttggccctgagccggggcccaggtgctcgaccacagatatcctgtttggcccctgtcccagttttgttcagccttattctttaactaaacttccttgtgacttttgagaactcagctctggtactttttcatgccttgcaaaatggcgttactgcagctagcttgctaagccttatggtggggtctttcattcccccctctttctggaaactgaataaaatcttttattcacgcgattctacttcttctggatctattgatttgagttggtgatactgttgggtcagaaccagggcctgcaccaccgaaattctgtcttttacaaactggaccaagcggttgagaatgcagggtccgaggagtaggattaataaaagtactatcagagggcccataatggtggatatcagggtcgtgaaccatggggacctgttaaacagtccctcaaaccacccttgtcctgatt

SEQ ID NO: 530 - DNA, 395 bp, Homo sapiens
cgctcacgcaagcatggttaacgtccctaaaacccgccggactttctgtaagaagtgtggcaagcaccaaccccataaagtgacacagtacaagaagggcaaggattctctgtacgcccagggaaagcggcgttatgacaggaagcagagtggctatggtgggcaaactaagccgattttctggaaaaaggctaaaactacaaagaagattgtgctaaggcttgagtgcgttgagcccaactgcagatctaagagaatgctggctattaaaagatgcaagcattttgaactgggaggagataagaagagaaagggccaagtgatccagttctaagtgtcatcttttattatgaagacaataaaatcttgagtttatgttcaaaaaaaaaaaaaaa

SEQ ID NO: 531 - DNA, 402 bp, Homo sapiens
aaatttagcttgtgcttttgaattacaggagaagggaatcataatttaataaaacgcttactagaaagaccattacagatcccaaacacttgggtttggtgaccctgtctttcttatatgaccctacaataaacatttgaaggcagcataggatggcagacagtaggaacattgtttcacttggcggcatgtttttgaaacctgctttatagtaactgggtgattgccattgtggtagagcttccactgctgtttataatctgagagagttaatctcagaggatgcttttttccttttaatctgctatgaatcagtacccagatgtttaattactgtacttattaaatcatgagggcaaaagagtgtagaatggaaaaaagtctcttgtatctagatacttt

SEQ ID NO: 532 - DNA, 587 bp, Homo sapiens
aaataaggcttggggtttttcccggtcttttggggaacttgaaactgaggtgggactttccagaaactgttgctagtttcgctttatctgagtaccatctgttcttggccctgagccggggcccgggtgctcgaccacagatatcctgtttggcccctgtcccagttttgttcagccttattctttaactaaacttccttgtgacttttgagaactcagctctggtactttttcatgccttgcaaaatggcgttactgcagctagcttgctaagccttatggtggggtctttcattcccccctctttctggaaactgaataaaatcttttatttacgcgattctactttttctggatctattgatttgagttggtgatactgttgggtcagaaccagggcctgcaccaccgaaattctgtcttttacaaactggaccaagcggttgagaatgcagggtccgaggagtaggattaataaaagtactatcagagggcccataatggtggatatcagggtcgtgaaccatggggacctgttaaacagtctctcaaaccacccttgtcctgattcgaacaatttttgcctc

SEQ ID NO: 533 - DNA, 599 bp, Homo sapiens
ccaccaaacaattcgagcagctccaggcagccatacatacagaccttggggccttagaaaaatcagtcagtgccctagaaaagtctctgacctcgttgtctgaggtggtcctacagaaccggagaggattagatctgctgttcctaaaagaagggggattatgtgctgccctaaaagaagaatgctgtttctatgcagaccacactggcgtagtaagggatagcatggctaagctaagagaaaggctaaaccagaggcaaaaattgttcgaatcaggacaagggtggtttgagggactgtttaacaggtccccatggttcacgaccctgatatccaccattatgggccctctgatagtacttttattaatcctactcctcggaccctgcattctcaaccgcttggtccagtttgtaaaagacagaatttcggtggtgcagaccctggttctgacccaacagtatcaccaactcaaatcaatagatccagaagaagtagaatcgcgtgaataaaagattttattcagtttccagaaagaggggggaatgaaagaccccaccataaggcttagcaagctagctgcagtaacgccattttgc

SEQ ID NO: 534 - DNA, 408 bp, Homo sapiens
ctggcttcactgctcaggtgattatcctgaaccatccaggccaaataagcgccggctatgcccctgtattggattgccacacggctcacattgcatgcaagtttgctgagctgaaggaaaagattgatcgccgttctggtaaaaagctggaagatggccctaaattcttgaagtctggtgatgccgccattgttgatatggttcctggcaagcccatgtgtgttgagagcttctcagactatccacctttgggtcgctttgctgktcgtgatatgagacagacagttgcggtgggtgtcatcaaagcagtggacaagaaggctgctggagctggcaaggtcaccaagtctgcccagaaagctcaraaggctaaatgaatattatscctaatacctgccaccccactct

SEQ ID NO: 535 - DNA, 523 bp, Homo sapiens
ctgacatatagcattgggcacactccagcagacgcccgaattcaaatcctggaaggatggaagaaacgcctggagaatatttgggatgagacaccactgtattttgctccaagcagcctctttgacctaaacttccaggcaggattcttaatgaaaaaagaggtacaggatgaggagaaaaacaagaaatttggcctttctgtgggccatcacttgggcaagtccatcccaactgacaaccagatcaaagctagaaaatgagattccttagcctggatttccttctaacatgttatcaaatctgggtatctttccaggcttccctgacttgctttagtttttaagatttgtgtttttctttttccacaaggaataaatgagagggaatcgactgtattcgtgcatttttggatcatttttaactgattcttatgattactatcatggcatataaccaaaatccgactgggctcaagaggccacttagggaaagatgtagaaagatgctagaaaaatgttcttt

SEQ ID NO: 536 - DNA, 560 bp, Homo sapiens
caagatcccaggatcagttcagtgatatgagaatcagcataaaccagacgcctgggaagagtcttgactttgggtttacaataaaatgggatattcctgggatcttcgtagcatcagttgaagcaggtagcccagcagaattttctcagctacaagtagatgatgaaattattgctattaacaacaccaagttttcatataacgattcaaaagagtgggaggaagccatggctaaggctcaagaaactggacacctagtgatggatgtgaggcgctatggaaaggctggttcacctgaaacaaagtggattgatgcaacttctggaatttacaactcagaaaaatcttcaaatctatctgtaacaactgatttctccgaaagccttcagagttctaatattgaatccaaagaaatcaatggaattcatgatgaaagcaatgcttttgaatcaaaagcatctgaatccatttctttgaaaaacttaaaaaggcgatcacaattttttgaacaaggtaaaccacaaagctaacaattcatgcactttcatggaattgttctc

SEQ ID NO: 537 - DNA, 518 bp, Homo sapiens
caatgacctaacaagttgctgcttctcagatgccaagactatgtatgaggttttccaaagaggactcgctgtgtctgacaatgggccctgcttgggatatagaaaaccaaaccagccctacagatggctatcttacaaacaggtgtctgatagagcagagtacctgggttcctgtctcttgcataaaggttataaatcatcaccagaccagtttgtcggcatctttgctcagaataggccagagtggatcatctccgaattggcttgttacacgtactctatggtagctgtacctctgtatgacaccttgggaccagaagccatcgtacatattgtcaacaaggctgatatcgccatggtgatctgtgacacaccccaaaaggcattggtgctgatagggaatgtagagaaaggcttcaccccgagcctgaaggtgatcatccttatggacccctttgatgatgacctgaagcaaagaggggagaagagtggaattgagatcttatccctatatgatg

SEQ ID NO: 538 - DNA, 132 bp, Homo sapiens
cggatacagccgacaccatgggtttcggagacctgaaaagccctgccggcctccaggtgctcaacgattacctggcggacaagagctacatcgaggggtatgtgccatcacaagcagatgtggcagtatttg

SEQ ID NO: 539 - DNA, 300 bp, Homo sapiens
ctgccacatccctgggcttacgatgcagcaggtgcttttttcaagacaggaatcaaaatgttaggaacacggcagaaaggtgacacctggagaccaaacgcaggataaggagtactgcagaggtcacagggaagtcacagaacagtaatacgctagcaggggcatggggcatgaagaacagaagaagagaggaagtgtttccgagcctccggaaaagaaatcagagccaagcacagcttcccgggtcacagaaccaattcattcgccaggcggcaccactgccgtcatttcagcttctgg

SEQ ID NO: 540 - DNA, 326 bp, Homo sapiens
aaaagacagaattagcgaagtctaatttttataatgaaataagtttttgatattgctctacttggacgattttagtgaccaaaactatggataaaactgcctaagcataacattaatatatttagaatggcattcttcagtgctagtatttgaaattggaattagtacattgtgcattcttagtagtctttatccctagaatcaattctctcagcatcaccaaactgaattggtgaaatagtgctaagattctgggcaataggaagattagtgaatatgatacattgattccagggtgccagggattggctgacattaaggaccag

SEQ ID NO: 541 - DNA, 570 bp, Homo sapiens
  misc_feature 539: n = A,T,C or G
aaataaggcttggggtttttcccggtcttttggggaacttgaaactgaggtgggactttccagaaactgttgctagtttcgctttatctgagtaccatctgttcttggccctgagccggggcccaggtgctcgaccacagatatcctgtttggcccctgtcccagttttgttcagccttattctttaactaaacttctttgtgacttttgagaactcagctctggtactttttcatgccttgcaaaatggcgttactgcagctagcttgctaagccttatggtggggtctttcattcccccctctttctggaaactgaataaaatcttttattcacgcgattctacttcttctggatctattgatttgagttggtgatactgttgggtcakaaccagggcctgcaccaccgaaattctgtcttttacaaactggaccaagcggttgaraatgcagggtccgaggagtaggattaataaaagtactatcagagggcccataatggtggatatcagggtcgtgaaccatggggacctgttnaacagtccctcaaaccacccttgtcctgatt

SEQ ID NO: 542 - DNA, 296 bp, Homo sapiens
cgccgatcacctctgagacccaacatgggcattttgtttatgagcaaggtgggtctcagaggtgatcggcgatcagagggcgatgtagttctagatccattgagacaagctctagacagtagcatgcagtcccacaacttgtaccagcatccccagcgtctggcattccatgtttctgctcctgtggcctccacggtgcaacaagctagcggtttacttggacctctgcctcatctttcttcttttgcgcttcagcctgcgcattcgcttcttcctccacttggctctcatggcgc

SEQ ID NO: 543 - DNA, 567 bp, Homo sapiens
ccaccaaacaattcgagcagctccaggcagccatacatacagaccttggggccttagaaaaatcagtcagtgccctagaaaagtctctgacctcgttgtctgaggtggtcctacagaaccggagaggattagatctgctgttcctaaaagaaggaggattatgtgctgccctaaaagaagaatgctgtttctatgcagaccacactggcgtagtaagggatagcatggctaagctaagagaaaggctaaaccagaggcaaaaattgttcgaatcaggacaagggtggtttgagggactgtttaacaggtccccatggttcacgaccctgatatccaccattatgggccctctgatagtacttttattaatcctactcctcggaccctgcattctcaaccgcttggtccagtttgtaaaagacagaatttcggtggtgcaggccctggttctgacccaacagtatcaccaactcaaatcaatagatccagaagaagtagaatcgcgtgaataaaagattttattcagtttccagaaagaggggggaatgaaagaccccaccataaggc

SEQ ID NO: 544 - DNA, 367 bp, Homo sapiens
aaagttgagctaagattctatcttggacaaccagctatcaccaggctcggtaggtttgtcgcctctacctataaatcttcccactattttgctacatagacgggtgtgctcttttagctgttcttaggtagctcgtctggtttcgggggtcttagctttggctctccttgcaaagttatttctagttaattcattatgcagaaggtataggggttagtccttgctatattatgcttggctataatttttcatctttcccttgcggtactatatctattgcgccaggtttcaatttctatcgcctatactttatttgggtaaatggtttggctaaggttgtctggtagtaaggtggagtgggtttggg

SEQ ID NO: 545 - DNA, 584 bp, Homo sapiens
ccaccaaacaattcgagcagctccaggcagccatacatacagaccttggggccttagaaaaatcagtcagtgccctagaaaagtctctgacctcgttgtctgaggtggtcctacagaaccggagaggattagatctgctgttcctaaaagaaggaggattatgtgctgccctaaaagaagaatgctgtttctatgcagaccacactggcgtagtaagggatagcatggctaagctaagagaaaggctaaaccagaggcaaaaattgttcgaatcaggacaagggtggtttgagggactgtttaacaggtccccatggttcacgaccctgatatccaccattatgggccctctgatagtacttttattaatcctactcctcggaccctgcattctcaaccgcttggtccagtttgtaaaagacagaatttcggtggtgcaggccctggttctgacccaacagtatcaccaactcaaatcaatagatccagaagaagtagaatcgcgtgaataaaagattttattcagtttccagaaagaggggggaatgaagaccccaccataaggcttagcaagctagctgcag

SEQ ID NO: 546 - DNA, 499 bp, Homo sapiens
aaataaggcttggggtttttcccggtcttttggggaacttgaaactgaggtgggactttccagaaactgttgctagtttcgctttatctgagtaccatctgttcttggccctgagccggggcccaggtgctcgaccacagatatcctgtttggcccctgtcccagttttgttcagccttattctttaactaaacttctttgtgacttttgagaactcagctctggtactttttcatgccttgcaaaatggcgttactgcagctagcttgctaagccttatggtggggtctttcattcccccctctttctggaaactgaataaaatcttttattcacgcgattctacttcttctggatctattgatttgagttggtgatactgttgggtcagaaccagggcctgcaccaccgaaattctgtcttttacaaactggaccaagcggttgagaatgcagggtccgaggagtaggattaataaaagtactatcagagggcccat

SEQ ID NO: 547 - DNA, 165 bp, Homo sapiens
ccaccaaacaattcgagcagctccagrcaghcatacatacagaccttggggccttagaaaaatcagtcagtgccctagaaaagtctctgacctcrttgwctgaggtggtcctacagaaccggagaggattakatctgctgdtcctaaaasaaggaggatgatgtg

SEQ ID NO: 548 - DNA, 571 bp, Homo sapiens
ccaccaaacaattcgagcagctccaggcagccatacatacagaccttggggccttagaaaaatcaatcagtgccctagaaaagtctctgacctcgttgtctgaggtggtcctacagaaccggagaggattagatctgctgttcctaaaagaaggaggattatgtgctgccctaaaagaagaatgctgtttctatgcagaccacactggcgtagtaagggatagcatggctaagctaagagaaaggctaaaccagaggcaaaaattgttcgaatcaggacaagggtggtttgagggactgtttaacaggtccccatggttcacgaccctgatatccaccattatgggccctctgatagtacttttattaatcctactcctcggaccctgcattctcaaccgcttggtccagtttgtaaaagacagaatttcggtggtgcaggccctggttctgacccaacagtatcaccaactcaaatcaatagatccagaagaagtagaatcgcgtgaataaaagattttattcagtttccagaaagaggggggaatgaaagaccccaccataaggcttag

SEQ ID NO: 549 - DNA, 361 bp, Homo sapiens
caagacgcgcggcgcggtttcggcgaaaaaccgaaagcaaaaattcagatggaggcggcgagggcttggacctctcgtctcctaaaagaaccacgtacccctccgacaaaggaggggctccaaatagtccgaatcggtcaggactcggacttactgattgggccacccagcgggcccctgatgcctctgagacgtctcccagggctgcggtcgggaatacgaactcgtcagttcttccacggaaccgccagatacagatctagttagctaactagtacagattcagacgcaggcgcaaaaagtagatgccggcacacacacacacgcacaaagacagagacggagacaaaacgatcgctgg

SEQ ID NO: 550 - DNA, 560 bp, Homo sapiens
caataaggcttggggtttttcccggtcttttggggaacttgaaactgaggtgggactttccagaaactgttgctagtttcgctttatctgagtaccatctgttcttggccctgagccggggcccaggtgctcgaccacagatatcctgtttggcccctgtcccagttttgttcagccttattctttaactaaacttccttgtgacttttgagaactcagctctggtactttttcatgccttgcaaaatggcgttactgcagctagcttgctaagccttatggtggggtctttcattcccccctctttctggaaactgaataaaatcttttattcacgcgattctacttcttctggatctattgatttgagttggtgatactgttgggtcagaaccagggcctgcaccaccgaaattctgtcttttacaaactggaccaagcggttgagaatgcagggtccgaggagtaggattaataaaagtactatcagagggcccataatggtggatatcagggtcgtgaaccatggggacctgttaaacagtccctcaaaccaccct

SEQ ID NO: 551 - DNA, 267 bp, Homo sapiens
attaattaaccactcactcatcgacctccccaccccatccaacatctccgcatgatgaaacttcggctcactcctcggcgcctgcctgatcctccaaatcaccacaggactattcctagccatgcactactcaccagacgcctcaaccgccttttcatcaatcgcccacatcactcgagacgtaaattatggctgaatcatccgctaccttcacgccaatggcgcctcaatattctttatctgcctcttcctacacatcgggcgagg

SEQ ID NO: 552 - DNA, 459 bp, Homo sapiens
ccaccaaacaattcgagcagctccaggcagccatacatacagaccttggggccttagaaaaatcagtcagtgccctagaaaagtctctgacctcgttgtctgaggtggtcctacagaaccggagaggattagatctgctgttcctaaaagaaggaggattatgtgctgccctaaaagaagaatgctgtttctatgcagaccacactggcgtagtaagggatagcatggctaagctaagagaaaggctaaaccagaggcaaaaattgttcgaatcaggacaagggtggtttgagggactgtttaacaggtccccatggttcacgaccctgatatccaccattatgggccctctgatagtacttttattaatcctactcctcggaccctgcattctcaaccgcttggtccagtttgtdaaagacagaatttcggtggtgcasaccctggttctgacccaac

SEQ ID NO: 553 - DNA, 519 bp, Homo sapiens
aaagagaaacttaaatcctgttgtattctttcaacacaagcaatgatacttctcagagtctgctcaaaagctcagctctgtggactccgtgacaaaatgtacgcgtccactgccgaccctcttggtttctgaaaccaacctttcttcctgctctcctctttaagagcaaaccccaacatgtataaggtcacagcaagtggtagccaggaaaagctgtgggacccctcatttgagtcacatccatatggcatggagaaagaaaacctctctgccagaaggaactgaactctggaagtcctaaggaaggtcaccatgctcagcagataggaaagcattgccaagggctgtccctcaagagcttagttttcttagggagaccagaaagacatcagatcctgactgccctgttttgctcaagttctgaaatgagtggcatgatgaagagctggtggagctgagggaaagagtcaaccatgtggggtggggtagtgaggaaggtgtatgaggaaacaaactggg

SEQ ID NO: 554 - DNA, 558 bp, Homo sapiens
  misc_feature 506: n = A,T,C or G
aaataaggcttggggtttttcccggtcttttggggaacttgaaactgaggtgggactttccagaaactgttgctagtttcgctttatctgagtaccatctgttcttggccctgagccggggcccaggtgctcgaccacagatatcctgtttggcccctgtcccagttttgttcagccttattctttaactaaacttccttgtgacttttgagaactcagctctggtactttttcatgccttgcaaaatggcgttactgcagctagcttgctaagccttatggtggggtctttcattcccccctctttctggaaactgaataaaatcttttattcacgcgattctacttcttctggatctattgatttgagttggtgatactgttgggtcagaaccagggcctgcaccaccgaaattctgtcttttacaaactggaccaagcggttgagaatgcagggtccgaggagtaggattaataaaagtactatcagagggcccataatggtngatatcagggtcgtgaaccatggggacctgttaaacagtccctcaaaccacc

SEQ ID NO: 555 - DNA, 561 bp, Homo sapiens
ccaccaaacaattcgagcagctccaggcagccatacatacagaccttggggccttagaaaaatcagtcagtgccctagaaaagtctctgacctcgttgtctgaggtggtcctacagaaccggagaggattagatctgctgttcctaaaagaaggaggattatgtgctgccctaaaagaagaatgctgtttctatgcagaccacactggcgtagtaagggatagcatggctaagctaagagaaaggctaaaccagaggcaaaaattgttcgaatcaggacaagggtggtttgagagactgtttaacaggtccccatggttcacgaccctgatatccaccattatgggccctctgatagtacttttattaatcctactcctcggaccctgcattctcaaccgcttggtccagtttgtaaaagacagaatttcggtggtgcaggccctggttctgacccaacagtrtcaccaactcaaatcaatagatccagaaaaagtrgaatcgcgtvaataaaagattttattcagtttccagaaagaggggggaatgaaagaccccacca

SEQ ID NO: 556 - DNA, 356 bp, Homo sapiens
aaagtttcatactaagttttattgtatgctgctgccagtgtatataaaacaattacccttgtgaaatagaaattcatgaaaattcagagaggtagatgttaaggactgacgaaagtagaagtttgtatattatggcacatgtgttacagggataagcttttgtacaggcttcaaatgtagctctcttgaatattcactggatcataaggagtggtttgggaaacctttgaaagattcattttactacaaaaaggaacagactttctggggtctgaagggatttgtacttgaagatactccagtcagcagagggtcatgttgagcattctgcagacagaactgtttcaagtctgcag

SEQ ID NO: 557 - DNA, 427 bp, Homo sapiens
ctgtagtgtctggggctgcggtcgctcagtctgcacccgacgaaggcagtctgcaccatagatcaccgtattctcagggatgacttcaaatgtatttaggttgcaacaagccccaatgatgcagccacttgtcaatattacatttctgcctacatatgcttttgattcaatgacattattatctcccatcttcatggcttgggaataacagccaacttcaaacacattattggtgccaatgatcataggttttggttctggatcttcagtgtcaggagtgatattatctgggtaagcatttatgataagggcctgttcttctattaggttcccttcgccaatcactattggcccggcttccgcaataattcttgctttagggtggatcactgtccgaggtcctcttttgagtcttctccgccatggt

SEQ ID NO: 558 - DNA, 477 bp, Homo sapiens
tgcaggccgcgaccggcatgtacgagcaactcaagggcgagtggaaccgtaaaagccccaatcttagcaagtgcggggaagagctgggtcgactcaagctagttcttctggagctcaacttcttgccaaccacagggaccaagctgaccaaacagcagctaattctggcccgtgacatactggagatcggggcccaatggagcatcctacgcaaggacatcccctccttcgagcgctacatggcccagctcaaatgctactactttgattacaaggagcagctccccgagtcagcctatatgcaccagctcttgggcctcaacctcctcttcctgctgtcccagaaccgggtggctgagttccacacggagttggagcggctgcctgccaaggacatacagaccaatgtctacatcaagcacccagtgtccctggagcaatacctgatggagggcagctacaacaaagtgttcctgg

SEQ ID NO: 559 - DNA, 522 bp, Homo sapiens
ccggagaggattagatctgctgttcctaaaagaaggaggattatgtgctgccctaaaagaagaatgctgtttctatgcagaccacactggcgtagtaagggatagcatggctaagctaagagaaaggctaaaccagaggcaaaaattgttcgaatcaggacaagggtggtttgagggactgtttaacaggtccccatggttcacgaccctgatatccaccattatgggccctctgatagtacttttattaatcctactcctcggaccctgcattctcaaccgcttggtccagtttgtaaaagacagaatttcggtggtgcaggccctggttctgacccaacagtatcaccaactcaaatcaatagatccagaagaagtagaatcgcgtgaataaaagattttattcagtttccagaaagaggggggaatgaaagaccccaccataaggcttagcaagctagctgcagtaacgccattttgcaaggcatgaaaaagtaccagagctgagttctcaaaagtcac

SEQ ID NO: 560 - DNA, 344 bp, Homo sapiens
ctgtccaatgacaacaggaccctcactctactcagtgtcacaaggaatgatgtaggaccctatgagtgtggaatccagaacgaattaagtgttgaccacagcgacccagtcatcctgaatgtcctctatggcccagacgaccccaccatttccccctcatacacctattaccgtccaggggtgaacctcagcctctcctgccatgcagcctctaacccacctgcacagtattcttggctgattgatgggaacatccagcaacacacacaagagctctttatctccaacatcactgagaagaacagcggactctatacctgccaggccaataactcagccagtgg

SEQ ID NO: 561 - DNA, 606 bp, Homo sapiens
ccaccaaacaattcgagcagctccaggcagccatacatacagaccttggggccttagaaaaatcagtcagtgccctagaaaagtctctgacctcgttgtctgaggtggtcctacagaaccggagaggattagatctgctgttcctaaaagaaggaggattatgtgctgccctaaaagaagaatgctgtttctatgcagaccacactggcgtagtaagggatagcatggctaagctaagagaaaggctaaaccagaggcaaaaattgttcgaatcaggacaagggtggtttgagggactgtttaacaggtccccatggttcacgaccctgatatccaccattatgggccctctgatagtacttttattaatcctactcctcggaccctgcattctcaaccgcttggtccagtttgtaaaagacagaatttcggtggtgcaggccctggttctgacccaacagtatcaccaactcaaatcaatagatccagaagaagtagaatcgcgtgaataaaagattttattcagtttccagaaagaggggggaatgaaagaccccaccataaggcttagcaagctagctgcagtaacgccattttgcaaggcat

SEQ ID NO: 562 - DNA, 527 bp, Homo sapiens
ccagagcagcatgagtggatacgaccaagttttacaggaaaactccagtgattttcaatcaaacattgcataggtaaccaaggagcagtgaacagcagctactacagtagtggaagccgtgcatctatgggcgtgaacggaatgggagggttgtctagcatgtccagtatgagtggtggatggggaatgtaattgatcgatcctgatcactgactcttggtcaacctttttttttttctttaagaaaacttcagtttaacagtttctgcaatacaagcttgtgatttatgcttactctaagtggaaatcaggattgttatgaagacttaaggcccagtatttttgaatacaatactcatctaggatgtaacagtgaagctgagtaaactataactgttaaacttaagttccagcttttctcaagttagttataggatgtacttaagcagtaagcgtatttaggtaaaagcagttgaattatgttaaatgttgccctttgccacgttaaattgaacactgtwttggat

SEQ ID NO: 563 - DNA, 572 bp, Homo sapiens
gccgcggcgggagaggaacgcgcagccagccttgggaagcccaggcccggcagccatggcggtggaaggaggaatgaaatgtgtgaagttcttgctctacgtcctcctgctggccttttgcgcctgtgcagtgggactgattgccgtgggtgtcggggcacagcttgtcctgagtcagaccataatccagggggctacccctggctctctgttgccagtggtcatcatcgcagtgggtgtcttcctcttcctggtggcttttgtgggctgctgcggggcctgcaaggagaactattgtcttatgatcacgtttgccatctttctgtctcttatcatgttggtggaggtggccgcagccattgctggctatgtgtttagagataaggtgatgtcagagtttaataacaacttccggcagcagatggagaattacccgaaaaacaaccacactgcttcgatcctggacaggatgcaggcagattttaagtgctgtggggctgctaactacacagattgggagaaaatcccttccatgtcgaaraaccgagtccccgactcctgctgcattaatg

SEQ ID NO: 564 - DNA, 283 bp, Homo sapiens
ctgctgctattaagttgcaagctctacagctagctacatgactgatggatcagtttgagatttgttcccttgtcaaaagtttaactctgatagaaggttggcctcacattctgatgtttggacatcccttagctaggatatgtctggtcgaacagacctttgtggcaagccagatgtcctatcacctcgctagcggtaagagggcctctttgagctctgtccacctagtcaggttggagacaccaggggatctaccaccaaaagctcccttctagtagtacag

SEQ ID NO: 565 - DNA, 277 bp, Homo sapiens
ctgcgcgtcgccaaagtgacaggcggtgcggcctccaagctctctaagatccgagtcgtccggaaatccattgcccgtgttctcacagttattaaccagactcagaaagaaaacctcaggaaattctacaagggcaagaagtacaagcccctggacctgcggcctaagaagacacgtgccatgcgccgccggctcaacaagcacgaggagaacctgaagaccaagaagcagcagcggaaggagcggctgtacccgctgcggaagtacgcggtcaagg

SEQ ID NO: 566 - DNA, 511 bp, Homo sapiens
ccaggctggtcttgaactcctagactcaagtgatttgcccatcttggcctcccaaagtgctgggaattataggtgttagccaccgcgcccagccctgaagcaggcttttagataagattgcatgtccatgaaaattttgagggaagaaaaaaacttccaccctgttgcaaagattaaggcagtgaaaggaatctgaaaaacactggatctattatgaccaagcttgtctgctcttaatgcattccaaactcctagttccactttgcatttcaatgtagaaatataacagtgttggtaacaaagtaacatctgacattccatgataattcttggggaaaggaagtctcttttgtgaaatatagatggagtcaaatgccttaggagaagttttggtcaaaacgtggtcctctacatgagctctagaagaaatcattcggctccttctactgctgtcgtggaaacaggtttcacatagtatggcccttcactcaggtaagttctgagcctcaaa

SEQ ID NO: 567 - DNA, 594 bp, Homo sapiens
tacagaccttggggccttagaaaaatcagtcagtgccctagaaaagtctctgacctcgttgtctgaggtggtcctacagaaccggagaggattagatctgctgttcctaaaagaaggaggattatgtgctgccctaaaagaagaatgctgtttctatgcagaccacactggcgtagtaagggatagcatggctaagctaagagaaaggctaaaccagaggcaaaaattgttcgaatcaggacaagggtggtttgagggactgtttaacaggtccccatggttcacgaccctgatatccaccattatgggccctctgatagtacttttattaatcctactcctcggaccctgcattctcaaccgcttggtccagtttgtaaaagacagaatttcggtggtgcaggccctggttctgacccaacagtatcaccaactcaaatcaatagatccagaagaagtagaatcgcgtgaataaaagattttattcagtttccagaaagaggggggaatgaaagaccccaccataaggcttagcaagctagctgcagtaacgccattttgcaaggcatgaaaaagtaccagagctgagttctc

SEQ ID NO: 568 - DNA, 563 bp, Homo sapiens
  misc_feature 537: n = A,T,C or G
cttaaacgcctgggctcaagcaaccctcccgcctccctgctgagattacaggtgtaagccaccataccgcaacctcaatgacacctttctgatggtctttacacagtctgtgatgtctggtggcccccctgccctggactcaataattgatagattttcctagagtaacagtatgagagctccagccattccattaaaagtattagttctgctttgagctgaaaccagttgagcctaatggaaggctggatgtctttcttcttcatccaagcaccctaatgactgtttagttacatccatagatgcagacaacataacacctgtgacttacttgaattgggataagccattccagaagtagcttatcctagacttggaaataagatttttttcaccactaacttccatgcttcagagatgacattcaaagccagattcccaagtgcctgatcatacctcccagtctcaggaagatatttgcttaccccttagaccaagaatcttaagatcttccccagctatgaagcctatcttggnatgggaaaccatgaaatttgtctttt

SEQ ID NO: 569 - DNA, 551 bp, Homo sapiens
aaattatcctaaaacctgttgagtgtgaatcctcttaaatctttcttttctgtttatgcttctggctgagaatggaagaagggacgaaggcttcaaatgactgaaattgttcagatggtttcttgtgaccgaccactgtaaagtatttttcaccagagtccaaaggcaagataaaaagtctctgacttgaaatcagaatcgatctgctgatctgctagccacagctcgaatattgccataaaccttggaaggaggatttcccaagattaggttgcaaatggcagttcttgccatcttgatattttggaaggagccaaggatgtgaactttcacatcagccaaaactatccttgtccgtgtcacattctctatggtgaatttggtttttcctcctttgccagcgattcttcctattgccctggatagatggtctccctttaggggtttaacatctgtaatttcaaaagactctaggaagaggtcatccaacctgatgagggcaagtgcatcctccacctgaaagccgagaataaaagctttcacaaaatcag

SEQ ID NO: 570 - DNA, 496 bp, Homo sapiens
ctgtcctgttggtcagggatacgggctcactgaatctgctggggctggaacaatttccgaagtgtgggactacaatactggcagagtgggagcaccattagtttgctgtgaaatcaaattaaaaaactgggaggaaggtggatactttaatactgataagccacaccccaggggtgaaattcttattgggggccaaagtgtgacaatggggtactacaaaaatgaagcaaaaacaaaagctgatttctttgaagatgaaaatggacaaaggtggctctgtactggggatattggagagtttgaacccgatggatgcttaaagattattgatcgtaaaaaggaccttgtaaaactacaggcaggggaatatgtttctcttgggaaagtagaggcagctttgaagaatcttccactagtagataacatttgtgcatatgcaaacagttatcattcttatgtcattggatttgttgtgccaaatcaaaaggaactaact

SEQ ID NO: 571 - DNA, 299 bp, Homo sapiens
ccaccaaacaattcgagcagctccaggcagccatacatacagaccttggggccttagaaaaatcagtcagtgccctagaaaagtctctgacctcgttgtctgaggtggtcctacagaaccggagaggattagatctgctgttcctaaaagaaggaggattatgtgctgccctaaaagaagaatgctgtttctatgcagaccacactggcgtagtaagggatagcatggctaagctaagagaaaggctaaaccagaggcaaaaattgttcgaatcaggacaagggtggtttgagagactg

SEQ ID NO: 572 - DNA, 578 bp, Homo sapiens
  misc_feature 504: n = A,T,C or G
ccttcgtgcagtttgcttcaaaggagatagcagaaaatgctctggggaaacacaaggaaagaatagggcacaggtatattgagatcttcagaagtagcaggagtgaaatcaaaggattttatgatccaccaagaagattgctgggacagcgaccgggaccatatgatagaccaataggaggaagagggggttattatggagctgggcgtggaagtatgtatgacagaatgcgacgaggaggtgatggatatgatggtggttatggaggttttgatgactatggtggctataataattacggctatgggaatgatggctttgatgacagaatgagagatggaagaggtatgggaggacatggctatggtggagctggtgatgcaagttcaggttttcatggtggtcatttcgtacatatgagagggttgccttttcgtgcaactgaaaatgacattgctaatttcttctcaccactaaatccaatacgagttcatattgatattnggagctgatggcagagccacaggagaagcagatgtagagtttgtgacacatgaagatgcagtagctgccatgtc

SEQ ID NO: 573 - DNA, 543 bp, Homo sapiens
aaaccgtaatggttacaaaccacaaacacatccatccagagactgaaaccgtttctatccggtcagtggcaaaactgttgaaagggcaatagttgaagctgttgggttttatatagtgtgaactctgataaatattcctaccaggactaaaacacagcacgctttgcgggcatggctgactcacaaaggttgtaacaaacaagaactactcttcactcgacaccatggctcagaggccaccgagaagcacgagtgactgacagctcctctgcttacaaacgaatgaaacccaaagtggatgtcgttctcacagcactgaaagtgcttcaggactcacactgatccaatactaactttcttccctattttacacatatttttctactgtccagtggaaatcattttctgttttggctaaacaacaaatactagtttataacaggaatggtaaaatctgtgagaattctgctcaatttaatacaagatcactactttctttagaatggtttctgcgtgtttctacgtcaccctctgtatttttag

SEQ ID NO: 574 - DNA, 402 bp, Homo sapiens
aaagactcttatcctgttacccttacataaaaccagttatgataattgtatgtttggaagataaattgtatgctgagccttaaaacccagtgtgactgtagaagatataatgcggacatgatttgaatttagtgacagcttggctgatgtcactgaaccagaagggtttatactgagtgaaggaaaggtaaaaagcagtattttgtatatttttgtaacaaaatataaatgaagatattttaccatgaagagattgcacttatccttgagaacagtctaaatataaatgaagatattttaccatgaagagattgcacttatccttgagaacagtctaatgatactttttctactttcagactgtttctagctaaagttctgataaaagtattgagttaattt

SEQ ID NO: 575 - DNA, 491 bp, Homo sapiens
tctgatagtacttttattaatcctactcctcggaccctgcattctcaaccgcttggtccagtttgtaaaagacagaatttcggtggtgcaggccctggttctgacccaacagtatcaccaactcaaatcaatagatccagaagaagtagaatcgcgtgaataaaagattttattcagtttccagaaagaggggggaatgaaagaccccaccataaggcttagcaagctagctgcagtaacgccattttgcaaggcatgaaaaagtaccagagctgagttctcaaaagtcacaagaaagtttagttaaagaataaggctgaacaaaactgggacaggggccaaacagaatatctgtggtcgagcacctgggccccggctcagggccaagaacagatggtactcagataaagcgaaactagcaacagtttctggaaagtcccacctcagtttcaagttccccaaaagaccgggaaaaaccccaagccttattt

SEQ ID NO: 576 - DNA, 424 bp, Homo sapiens
  misc_feature 385: n = A,T,C or G
cctgaagctgggggctacagggggtcactggctcacccggtccccccgtaatctgtaaaacatactgggtgagggaggctgctggaggacctgaatctctcccttctccaggcagtagtgaggcatatgcctgttggccttgggcccattaaagatcattccagccccagtgctgttctctgaattcttggggaacacagggatgggggctcctaatgaggaccccagaaactctgagctctcacaactttcaaaggacacttgcctccctyctctgcccacacctbcaccattacagcatttgatcccacaagtaaggagggggcggtcctattccaccacctctctggtatccccccaaccttctgagwtgtctgagacccangaaagggttaaggtcaggacccctctctcctgggctgaa

SEQ ID NO: 577 - DNA, 161 bp, Homo sapiens
gggctacggaggtggttatgacaactatggaggaggaaattatggaagtggaaattacaatgattttggaaattataaccagcaaccttctaactacggtccaatgaagagtggaaactttggtggcagcaggaacatggggggaccatatggtggaggaa

SEQ ID NO: 578 - DNA, 486 bp, Homo sapiens
ccagaaaaagttattttaattttctattaaatattcttctcaaagcattattttatcctatatctcactgaattttaagaaataacattagtattagaaaaactaggaaaaaagataaatgcagataattaaacttacatgaaaaaggaaaattataacaaaggactgagaacgttataaattgaaatgagattataatttgaaaactgcatctgaaagcaaactttattgttcaattattcttaatgatggtgttttatgactaatacactggtttttcaataaggaaacccatgttaaaaatatttttattttaaaaataagcctgtgttcaagctctgatcatatttcttttattttgatttgggaagaaaatactgtttctgatagcatgaaatgcaaaatttttagatttttaatctcactaattttaagaactattgagaaattgattaatgacatgaagtgcacaacactaattactgg

SEQ ID NO: 579 - DNA, 243 bp, Homo sapiens
  misc_feature 87: n = A,T,C or G
ccttatwtctcttgtcctttcgtacagggaggaattygaagtagatagaaaccgacctgkattactccggkctgaactcaratcacnstaggattttaatcgttgaacraacgaacctttaatmgcggctgcaccatcgggatgtcctgatccaacatcsaggtcghawrccctmttgttgatatggactstaaaataggattgcgctgtkatccctagggyaacttgttccgttggtcaagt

SEQ ID NO: 580 - DNA, 339 bp, Homo sapiens
ctgttcttccagtcctggatttagcccaaaggcagaatgggtggttgcccatctctgctatgaacaaggttgcagaagttttacaagtacctccaatgagagtatatgaagtagcaactttttatacaatgtataatcgaaagccagttggaaagtatcacattcaggtctgcactactacaccctgcatgcttcgaaactctgacagcatactggaggccattcagaaaaagcttggaataaaggttggggagactacacctgacaaactwttcactcttatagaagtggaatgtttaggggcctgwrtgaacgcaccaatggttcaaataaatgaca

SEQ ID NO: 581 - DNA, 540 bp, Homo sapiens
ccaccaaacaattcgagcagctccaggcagccatacatacagaccttggggccttagaaaaatcagtcagtgccctagaaaagtctctgacctcgttgtctgaggtggtcctacagaaccggagaggattagatctgctgttcctaaaagaaggaggattatgtgctgccctaaaagaagaatgctgtttctatgcagaccacactggcgtagtaagggatagcatggctaagctaagagaaaggctaaaccagaggcaaaaattgttcgaatcaggacaagggtggtttgagggactgtttaacaggtccccatggttcacgaccctgatatccaccattatgggccctctgatagtacttttattaatcctactcctcggaccctgcattctcaaccgcttggtccagtttgtaaaagacagaatttcggcggtgcaggccctggttctgacccaacagtatcaccaactcaaatcaatagatccagaagaagtagaatcgcgtgaataaaagattttattcagtttccagaaagagg

SEQ ID NO: 582 - DNA, 273 bp, Homo sapiens
aaaaaaatcatacctatgaggtgtgctacaggaattcagatacaataagttgcatataaaacccgacctcattgctcattgtggtaaagcaaggatgatgagaaaatgcacctcaggagcaaaaacacgcttcacgggcactccgggacccaagtcccgagacatttccacgtgaccttctggaaagacacaccgcccacctgactgcacgacgggactggtccagcctcccggctcctcaggaaggagatgagtttcctacaaagtgagtgg

SEQ ID NO: 583 - DNA, 380 bp, Homo sapiens
aaatttcttcttgtaaacaaattaatcctagtgcagttctgtgctacacatttttagcaatgagtaatgcagacatcttctggtgcaggccagtacaataagcttcaaaggttatctcaagaccctgttgttggcttgatggttttacttataaccagtttcgatgtttacctttcacagaatgtcttatttgacagctttagatgaccaatttaaccaggcttatatatggcgccaaatactggtttcacgggaaagaaggtccgatcctctttatgagcatttcttcctgcttccaaagaatatgttgtgaaattaaagagggtgaagtttaactatggtagaagtagactgccagtccttttctggtgtaccatttt

SEQ ID NO: 584 - DNA, 577 bp, Homo sapiens
  misc_feature 506: n = A,T,C or G
aaataaggcttggggtttttcccggtcttttggggaacttgaaactgaggtgggactttccagaaactgttgctagtttcgctttatctgagtaccatctgttcttggccctgagccggggcccaggtgctcgaccacagatatcctgtttggcccctgtcccagttttgttcagccttattctttaactaaactttcttgtgacttttgagaactcagctctggtactttttcatgccttgcaaaatggcgttactgcagctagcttgctaagccttatggtggggtctttcattcccccctctttctggaaactgaataaaatcttttattcacgcgattctacttcttctggatctattgatttgagttggtgatactgttgggtcagaaccagggcctgcaccaccgaaattctgtcttttacaaactggaccaagcggttgagaatgcagggtccgaggagtaggattaataaaagtactatcagagggcccataatggtngatatcagggtcgtgaaccatggggacctgttaaacagtccctcaaaccacccttgtcctgattcgaacaa

SEQ ID NO: 585 - DNA, 231 bp, Homo sapiens
ccttgagacttgaaaccagaagaagtgtgagaagactggctagtgtggaagcatagtgaacacactgattaggttatggtttaatgttacaacaactattttttaagaaaaacaagttttagaaatttggtttcaagtgtacatgtgtgaaaacaatattgtatactaccatagtgagccatgattttctaaaaaaaaataaatgttttgggggcaaaaaaaaaaaaaaaa

SEQ ID NO: 586 - DNA, 558 bp, Homo sapiens
aaagacgtaagtaaaagaaccaataaagctgcttacttgtaacaatgtcaaaagcagaaatataacatacaggggattggttcttttacttacgtctttaaatatatggagcaacagtacggtcagtctgcatctcatgctaactttttgttgggaatcataaccattcctacggttgcaactggaatgtttttaggaggatttatcattaaaaaattcaaattgtctttagttggaattgccaaattttcatttcttacttcgatgatatccttcttgtttcaacttctatatttccctctaatctgcgaaagcaaatcagttgccggcctaaccttgacctatgatggaaataattcagtggcatctcatgtagatgtaccactttcttattgcaactcagagtgcaattgtgatgaaagtcagtgggaaccagtctgtgggaacaatggaataacttacctgtcaccttgtctagcaggatgcaaatcctcaagtggtattaaaaagcatacagtgttttataactgtagttgtgtggaagtaactggtctccag

SEQ ID NO: 587 - DNA, 566 bp, Homo sapiens
  misc_feature 527: n = A,T,C or G
ccaccaaacaattcgagcagctccaggcagccatacatacagaccttggggccttagaaaaatcagtcagtgccctagaaaagtctctgacctcgttgtctgaggtggtcctacagaaccggagaggattagatctgctgttcctaaaagaaggaggattatgtgctgccctaaaagaagaatgctgtttctatgcagaccacactggcgtagtaagggatagcatggctaagctaagagaaaggctaaaccagaggcaaaaattgttcgaatcaggacaagggtggtttgagggactgtttaacaggtccccatggttcacgaccctgatatccaccattatgggccctctgatagtacttttattaatcctactcctcggaccctgcattctcaaccgcttggtccagtttgtaaaagacagaatttcggtggtgcaggccctggttctgacccaacagtatcaccaactcaaatcaatagatccagaagaagtagaatcgcgtgaataaaagattttattcagntttccagaaagaggggggaatgaaagaccccaccataag

SEQ ID NO: 588 - DNA, 157 bp, Homo sapiens
gcttttttttttttttttttttttttttgagctaraaragattttttattgaagggcgagtctccggcatctgatggcagctacaactggatctcacggaacgcccgcttctccaccagcttcaccttgtacttgcgtttgaacttggctctctctc

SEQ ID NO: 589 - DNA, 483 bp, Homo sapiens
aaagatattttcttgaattatttagaacatggtaagcctggtattttttaatcaaacaaaatatttatgaaatgggttttctcttaattctggattcatcatggctttctaataccaattgtaatatttacaatattcaccaaaacttagaattttgcaaatgctggaattctgccagtgtttctttgctaagccttgcatgcaaaatttgaaattttaacattggcacccaaaacctacatggaatgtatgtctggagtatttcaaactttacattgaaacataatttccttggaaaacaaaccataagcctgaggaggtttttatcaactggaatgctttatattagtttgtttttcactgtacattcctcattttacattcatttaacctgccgattatttaatttttttattgtaaagtagtttttagcatttgcttttatttttttactttgatgccttttcaaattggcatgtcttt

SEQ ID NO: 590 - DNA, 432 bp, Homo sapiens
ctttttttttttttttttttttttttcctctaragggggtaragggggtgctatagggtaaatacgggccctatttcaaaratttttaggggaattaattytaggacratgggcatgaaactgkggtttgctccacaratttcaragcattgaccgtagtatacccccggtcgtgtagcggtgaaagtggtttggtttaaacgtccgggaattgcatytgtttttaagcctaatgkggggacagctcatgagtgcaaracgtcttgkgatgtaattattatacraatgggggcttcaatcgggagtactactcgattgtcaacgtcaaggagtcscaggtcgcctggttctaggaataatgggggaagtatgtaggagttgaaaattagtccgccgtartcggtgtactcgtaggttcagtaccattggtgg

SEQ ID NO: 591 - DNA, 231 bp, Homo sapiens
ctgcccctccctcagggagcgatccaggggaagccagtgacactaaaacaagaggacacaatggcacctctgcccttcccctcccgacagcccatcacctctaatagaggcagtgagactgcaggtgggctgggcccacccagggagctgatgccccttctccccttcctggacacactctcatgtccccttcctgttcttccttcctagaagcccctgtcgcccacccag

SEQ ID NO: 592 - DNA, 579 bp, Homo sapiens
cctgtcctctgggagtgacctttattagtccaccccttggagctagacatcctgtacttagtcacggggatggtggaagagggagaagaggaagggtgaagggaagggctctttgctagtatctccatatctagacgatggttttagatgataaccacaggtctacaagagcgtttttagtaaagtgcctgtgttcattgtggacaaagttattattttgcaacatctaagctttacgaatggggtgacaacttatgataaaaactagagctagtgaattagcctatttgtaaatacctttgttataattgataggatacatcttggacatggaattgttaagccacctctgagcagtgtatgtcaggacttgttcattaggttggcagcagaggggcagaaggaattatacaggtagagatgtatgcagatgtgtccatatatgtccatatttacattttgatagccattgatgtatgcatctcttggctgtactataagaacacattaattcaatggaaatacactttgctaatattttaatggtatagatctgctaatgaattctcttaaaacata

SEQ ID NO: 593 - DNA, 554 bp, Homo sapiens
ctgctgcctgtggcgtgtgtgggctggatcccttgaaggctgagtttttgagggcagaaagctagctatgggtagccaggtgttacaaaggtgctgctccttctccaacccctacttggtttccctcaccccaagcctcatgttcataccagccagtgggttcagcagaacgcatgacaccttatcacctccctccttgggtgagctctgaacaccagctttggcccctccacagtaaggctgctacatcaggggcaaccctggctctatcattttccttttttgccaaaaggaccagtagcataggtgagccctgagcactaaaaggaggggtccctgaagctttcccactatagtgtggagttctgtccctgaggtgggtacagcagccttggttcctctgggggttgagaataagaatagtggggagggaaaaactcctccttgaagatttcctgtctcagagtcccagagaggtagaaaggaggaatttctgctggactttatctgggcagaggaaggatggaatgaaggtagaaaaggcagaattacag

SEQ ID NO: 594 - DNA, 560 bp, Homo sapiens
ccaccaaacaattcgagcagctccaggcagccatacatacagaccttggggccttagaaaaatcagtcagtgccctagaaaagtctctgacctcgttgtctgaggtggtcctacagaaccggagaggattagatctgctgttcctaaaagaaggaggattatgtgctgccctaaaagaagaatgctgtttctatgcagaccacactggcgtagtaagggatagcatggctaagctaagagaaaggctaaaccagaggcaaaaattgttcgaatcaggacaagggtggtttgagggactgtttaacaggtccccatggttcacgaccctgatatccaccattatgggccctctgatagtacttttattaatcctactcctcggaccctgcattctcaaccgcttggtccagtttgtaaaagacagaatttcggtggtgcaggccctggttctgacccaacagtatcaccaactcaaatcaatagatccagaagaagtagaatcgcgtgaataaaagattttattcagtttccagaaagaggggggaatgaaagaccccacc

SEQ ID NO: 595 - DNA, 541 bp, Homo sapiens
ccaccaaacaattcgagcagctccaggcagccatacatacagaccttggggccttagaaaaatcagtcagtgccctagaaaagtctctgacctcgttgtctgaggtggtcctacagaaccggagaggattagatctgctgttcctaaaagaaggaggattatgtgctgccctaaaagaagaatgctgtttctatgcagaccacactggcgtagtaagggatagcatggctaagctaagaggggggaatgaaagaccccaccataaggcttagcaagctagctgcagtaacgccattttgcaaggcatgaaaaagtaccagagctgagttctcaaaagtcacaaagaagtttagttaaagaataaggctgaacaaaactgggacaggggccaaacaggatatctgtggtcgagcacctgggccccggctcagggccaagaacagatggtactcagataaagcgaaactagcaacagtttctggaaagtcccacctcagtttcaagttccccaaaagaccgggaaaaaccccaagccttattt

SEQ ID NO: 596 - DNA, 301 bp, Homo sapiens
ctgtagttgactgaagtcgctaaacaggacggatttaagtagaggtgatatgtccagtcaccggcatagagacgtcctctgcgtcaccatccacacacagggcttctggtagacatcaggcaaagctctccatgttaatattcatctgaatatggataattagggtggctagcaaaactatcactgttaaaatagtggagatttctgtctaggccatctatggctttcatgtcctctgcagtcaactggaactcaaaaacctgcacgttctgtctgatgcgctgctcattgtagctcttgg

SEQ ID NO: 597 - DNA, 252 bp, Homo sapiens
aaaaaaaaagaataactttttttgcctctttagattacatagaagcattgtagtcttggtagaaccagtatttttgttgtttatttataaggtaattgtgtgtggggaaaagtgcagtatttacctgttgaattcagcatcttgagagcacaagggaaaaaataagaacctacgaatatttttgaggcagataatgatctagtttgactttctagttagtggtgttttgaagagggtattttattgtttttt

SEQ ID NO: 598 - DNA, 123 bp, Homo sapiens
ccaatcctattgttwcttaaagccctmtggktttgtgtgaccgtcccctctacttcattctactacaatcccctaattcaaatcttcaccacttttcctctaaaccattacagctctghctct

SEQ ID NO: 599 - DNA, 490 bp, Homo sapiens
ctgcaggaaacaagtttcacaaaagaagcctacaagaagtacatcaaagattacatgaaatcaatcaaagggaaacttgaagaacagagaccagaaagagtaaaaccttttatgacaggggctgcagaacaaatcaagcacatccttgctaatttcaaaaactaccagttctttattggtgaaaacatgaatccagatggcatggttgctctattggactaccgtgaggatggtgtgaccccatatatgattttctttaaggatggtttagaaatggaaaaatgttaacaaatgtggcaattattttggatctatcacctgtcatcataactggcttctgcttgtcatccacacaacaccaggacttaagacaaatgggactgatgtcatcttgagttcttcatttattttgactgtgatttatttggagtggaggcattgtttttaagaaaaacatgtcatgtaggttgtctaaaaataaaatgcattt

SEQ ID NO: 600 - DNA, 495 bp, Homo sapiens
gggaagcccgcaaacaggtggaggtcttcagacagaatcttttccaggaggctgaggaattcctctacagattcttgccacagaaaatcatatacctgaatcagctcttgcaagaggactccctcaatgtggctgacttgacttccctccgggccccactggacatccccatcccagaccctccacccaaggatgatgagatggaaacagataagcaggagaagaaagaagtccctaagtgtggatttctccctgggaatgagaaagtcctgtccctgcttgccctggttaagccagaagtctggactctcaaagagaaatgcattctggtgattacatggatccaacacctgatccccaagattgaagatggaaatgattttggggtagcaatccaggagaaggtgctggagagggtgaatgccgtcaagaccaaagtggaagctttccagacaaccatttccaagtacttctcagaacgtggggatgctgtgg

SEQ ID NO: 601 - DNA, 216 bp, Homo sapiens
aaacaacgttaaactcttagcctacaaggtggctcttatgtacatagttgttaatacatccaattaatgatgtctgacatgctatttttgtagggagaaaatatgtgctaatgatattttgagttaaaatatcttttggggaggatttgctgaaaagttgcacttttgttacaatgcttatgcttggtacaagcttatgctgtcttaaattatttt

SEQ ID NO: 602 - DNA, 533 bp, Homo sapiens
aaataaggcttggggtttttcccggtcttttggggaacttgaaactgaggtgggactttccagaaactgttgctagtttcgctttatctgagtaccatctgttcttggccctgagccggggcccaggtgctcgaccacagatatcctgtttggcccctgtcccagttttgttcagccttattctttaactaaacttccttgcgacttttgagaactcagctctggtactttttcatgccttgcaaaatggcgttactgcagctagcttgctaagccttatggtggggtctttcattcccccctctttctggaaactgaataaaatcttttattcacgcgattctacttcttctggatctattgatttgagttggtgatactgttgggtcagaaccagggcctgcaccaccgaaattctgtcttttacaaactggaccaagcggttgagaatgcagggtccgaggagtaggattaataaaagtactatcagagggcccataatggtggatatcagggtcgtgaaccatggggac

SEQ ID NO: 603 - DNA, 614 bp, Homo sapiens
ccaccaaacaattcgagcagctccaggcagccatacatacagaccttggggccttagaaaaatcagtcagtgccctagaaaagtctctgacctcgttgtctgaggtggtcctacagaaccggagaggattagatctgctgttcctaaaagaaggaggattatgtgctgccctaaaagaagaatgctgtttctatgcagaccacactggcgtagtaagggatagcatggctaagctaagagaaaggctaaaccagaggcaaaaattgttcgaatcaggacaagggtggtttgagggactgtttaacaggtccccatggttcacgaccctgatatccaccattatgggccctctgatagtacttttattaatcctactcctcggaccctgcattctcaaccgcttggtccagtttgtaaaagacagaatttcggtggtgcaggccctggttctgacccaacagtatcaccaactcaaatcaatagatccagaagaagtagaatcgcgtgaataaaagattttattcagtttccagaaagaggggggaatgaaagaccccaccataaggcttagcaagctagctgcagtaacgccattttgcaaggcatgaaaaagt

SEQ ID NO: 604 - DNA, 397 bp, Homo sapiens
aaaacctgtttctgagataagtagcataaggcgcatttgaagaaatactattgttgtatcacagagaacttccatgccttgaaatcatttttttcagagtattattaataagatggtctagctatgcagagcaaaaaagaaaaaaaaatcttcaaaagccaagactgtcaggcacatgaaggtatgcataaacggtcttcacatttaattttgtatgattcgggagatacctccatgtacatctaaccaggtcaggcagcataagtcctcagtaaccctgggtgtgccggcttcaagccaaagtattctgttgagtttggtttgtggagagacatttgaaatgttgcttcatagcttccattttctggagaagtggaagaaatgaagcatgaaaagg

SEQ ID NO: 605 - DNA, 573 bp, Homo sapiens
  misc_feature 547: n = A,T,C or G
cacacaaggcgggagctagccaagatgaagcaggagccggtgaaacctgaagaaggcagagatatggcaaacaggattggcgcttttgggtacatggagtgttcagcaaagaccaaagatggagtgagagaggtttttgaaatggctacgagagctgctctgcaagctagacgtgggaagaaaaaatctgggtgccttgtcttgtgaaaccttgctgcaagcacagcccttatgcggttaattttgaagtgctgtttattaatcttagtgtatgattactggcctttttcatttatctataatttacctaagattacaaatcagaagtcatcttgctaccagtatttagaagccaactacgattattaacgatgtccaacccgtctggcccaccagggtccttttgacactgctctaacagccctcctctgcactcccacctgacacaccaggcgctaattcaaggaatttcttaacttcttgcttctttctagaaagagaaacagttggtaacttttgtgaattaggctgtaactactttataacnaacatgtcctgcctattatctgtcag

SEQ ID NO: 606 - DNA, 494 bp, Homo sapiens; identical to SEQ ID NO: 379

SEQ ID NO: 607 - DNA, 461 bp, Homo sapiens
cctggtttattgaaaatgaagagcaggaatatgttcaaactgtgaagtcatccaaaggtggtcccggatcagcggtgagcccctatcctaccttcaatccatcctcggatgtcgctgccttgcataaggccataatggttaaaggtgtggatgaagcaaccatcattgacattctaactaagcgaaacaatgcacagcgtcaacagaccaaagcagcatatctccaggaaacaggaaagcccctggatgaaacactgaagaaagcccttacaggtcaccttgaggaggttgttttagctctgctaaaaactccagcgcaatttgatgctgatgaacttcgtgctgccatgaagggccttggaactgatgaagatactctaattgagattttggcatcaagaactaacaaagaaatcagagacattaacagggtctacagagaggaactgaagagagatctg

SEQ ID NO: 608 - DNA, 515 bp, Homo sapiens
ggaggcttttggagctgctaaaatgccggattacctcggtgccgatcagcggaagaccaaagaggatgagaaggacgacaagcccatccgagctctggatgagggggatattgccttgttgaaaacttatggtcagagcacttactctaggcagatcaagcaagttgaagatgacattcagcaacttctcaagaaaattaatgagctcactggtattaaagaatctgacactggcctggccccaccagcactctgggatttggctgcagataagcagacactccagagtgaacagcctttacaggttgccaggtgtacaaagataatcaatgctgattcggaggacccaaaatacattatcaacgtaaagcagtttgccaagtttgtggtggaccttagtgatcaggtggcgcctactgacattgaagaagggatgagagtgggcgtggatagaaataaatatcaahttcacattccattgcctcctaagattgacccaacagttaccatgatgc

SEQ ID NO: 609 - DNA, 248 bp, Homo sapiens
ctggatctggcgcttctactttgagggcttctttgacctcattgctgtggtggccggcgtagwccaraccatcctatactgtgacttcttctacttgtacattacaaaagtactcaagggaaagaagctcagtttgccarcataagtgccaaagaccatcaccagcatctgtccttcagggtgctcggacagaatwsttaccacadcaaaggcataasatgcttgatacggaaaatcaraaacttaac

SEQ ID NO: 610 - DNA, 457 bp, Homo sapiens
aaagtttatggcggtgaagtgggcgtcttcaaagactagtacttacacagtttagaagatttcaaggtactgctgacagtagtttattatgtcagtatacatacatgtgtagagatcataatttagttcccttcttaatgttacaatttcttagtttacttttcctaaagggccatagcataattcttgattcctggtggaaatcttttctgaggtgtgggggtgggcaaggtgtggattgctgtttacgatagtgccttcattagttttagttctgtctgttttcattcattattgactcaaaggtattagaacaggcccttatctttttcctattagatttatttttgttttttactttatgtaagttcagaatccttttttaagtgatgactactgatgaaataatgttactagtagctgaattttagacttgatgctatgttgattaatattt

SEQ ID NO: 611 - DNA, 420 bp, Homo sapiens
cctgcggctctgcggcgcctctctgcaaaggctcgggtccaccttccagactgcaggctgccgtgtgtgctgtggaggatgccacagtgttaaggctgaccaggaccagaaggtgacactgggctctcctgttggaccggcacatttctatgccacaaatgaccactacttctctgatcctttcttaaagtatttagaaacatacttgaacttacactgggcaaatgttgtttactacagtccaaatgaagttaaagtggtagcagaaggatttgattcagcaaatgggatcaatatttcacctgatgataagtatatctatgttgctgacatattggctcatgaaattcatgttttggaaaaacacactaatatgaatttaactcagttgaaggtacttgagctggatacactggtgga

SEQ ID NO: 612 - DNA, 569 bp, Homo sapiens
  misc_feature 532: n = A,T,C or G
cctctgggctttacggaggaagtagaggttattcttcagtacatctgtgaatgtgaatgccaaagcgaaggcatccctgaaagtcccaagtgtcatgagggaaatgggacatttgagtgtggcgcgtgcaggtgcaatgaagggcgtgttggtagacattgtgaatgcagcacagatgaagttaacagtgaagacatggatgcttactgcaggaaagaaaacagttcagaaatctgcagtaacaatggagagtgcgtctgcggacagtgtgtttgtaggaagagggataatacaaatgaaatttattctggcaaattctgcgagtgtgataatttcaactgtgatagatccaatggcttaatttgtggaggaaatggtgtttgcaagtgtcgtgtgtgtgagtgcaaccccaactacactggcagtgcatgtgactgttctttggatactagtacttgtgaagccagcaacggacagatctgcaatggccggggcatctgcgagtgtggtgtctgtaagtgtacagatccgnagtttcaagggtaaacgtgtgagatgtgtcarahytg

SEQ ID NO: 613 - DNA, 552 bp, Homo sapiens
gaactgggttaggtgccgctgttgctgctcgtgttgaatctagaaccgtagccagacatgggactggaggacgagcaaaagatgcttaccgaatccggagatcctgaggaggaggaagaggaagaggaggaattagtggatcccctaacaacagtgagagagcaatgcgagcagttggagaaatgtgtaaaggcccgggagcggctagagctctgtgatgagcgtgtatcctctcgatcacatacagaagaggattgcacggaggagctctttgacttcttgcatgcgagggaccattgcgtggcccacaaactctttaacaacttgaaataaatgtgtggacttaattcaccccagtcttcatcatctgggcatcagaatatttccttatggttttggatgtaccatttgtttcttatttgtgtaactgtaagttcacatgaacctcatgggtttggcttaggctggtagcttctatgtaattckcaatgattccatctaaataaaagttctatgatctgcaaaaaaaaaaaaaaaaaaaaaaaagcttgt

SEQ ID NO: 614 - DNA, 456 bp, Homo sapiens
aaataaggcttggggtttttcccggtcttttggggaacttgaaactgaggtgggactttccagaaactgttgctagtttcgctttatctgagtaccatctgttcttggccctgagccggggcccaggtgctcgaccacagatatcctgtttggcccctgtcccagttttgttcagccttattctttaactaaacttctttgtgacttttgagaactcagctctggtactttttcatgccttgcaaaatggcgttactgcagctagcttgctaagccttatggtggggtctttcattcccccctctttctggaaactgaataaaatcttttattcacgcgattctacttsttctggatctattgatttgagttggtgatactgttgggtcagaaccagggcctgcaccaccgaaattstgwcttttacaaactggaccaarcgrttgakaatgcakg

SEQ ID NO: 615 - DNA, 506 bp, Homo sapiens
gaagggttatgtggtccgaatcagtggtgggaacgacaaacaaggtttccccatgaagcagggtgtcttgacccatggccgtgtccgcctgctactgagtaaggggcattcctgttacagaccaaggagaactggagaaagaaagagaaaatcagttcgtggttgcattgtggatgcaaatctgagcgttctcaacttggttattgtaaaaaaaggagagaaggatattcctggactgactgatactacagtgcctcgccgcctgggccccaaaagagctagcagaatccgcaaacttttcaatctctctaaagaagatgatgtccgccagtatgttgtaagaaagcccttaaataaagaaggtaagaaacctaggaccaaagcacccaagattcagcgtcttgttactccacgtgtcctgcagcacaaacggcggcgtattgctctgaagaagcagcgtaccaagaaaaataaagaagaggctgcagaatatgctaaacttttgg

SEQ ID NO: 616 - DNA, 166 bp, Homo sapiens
gcgcaggaccatcagcccactccagatagctgcatcatcagcatggttgtgggccagcttaaggcggatgaagaccccatcatggggttccaccagatgttcctattaaagaacatcaacgatgcttgggtttgcaccaatgacatgttcaggctcgccctgcaca

SEQ ID NO: 617 - DNA, 422 bp, Homo sapiens
gcattctcaaccgcttggtccagtttgtaaaagacagaatttcggtggtgcaggccctggttctgacccaacagtatcaccaactcaaatcaatagatccagaagaagtagaatcgcgtgaataaaagattttattcagtttccagaaagaggggggaatgaaagaccccaccataaggcttagcaagctagctgcagtaacgccattttgcaaggcatgaaaaagtaccagagctgagttctcaaaagtcacaaggaagtttagttaaagaataaggctgaacaaaactgggacaggggccaaacaggatatctgtggtcgagcacctgggccccggctcagggccaagaacagatggtactcagataaagcgaaactagcaacagtttctggaaagtcccacctcagtttcaagttcccc

SEQ ID NO: 618 - DNA, 299 bp, Homo sapiens
cytcacagktgctgggcakgaatcacaraggyttgctctgcatyatgtmttscgttaacctgaagctttgggtttattgtgtttggcaaaccactygwcacttttatctgctgccattgcatcatccaacaatttgcttccctctggatccatcttaraaagytctcsaaatgcttcatycccgacaaagcaaatttcatgtccgtcagggtcsgccagaatgaccacctgtactgttgctttccctggggtgtccaggctcaccargggagtcasaatcttctggkkctcccttttca

SEQ ID NO: 619 - DNA, 545 bp, Homo sapiens
ccctccgcctgtgttacgtgttgatgaccggcagcggctggcccgggagcgacgtgaggaacgggagaaacagctagctgcaagagaaatagtgtggttagaaagagaagagcgagccaggcagcactacgagaagcacctggaagagcggaagaagaggttggaggagcagaggcagaaggaggagcggaggagggctgctgtggaggagaagcggaggcagagacttgaggaggacaaagaacgccacgaagctgttgtacggcgcacaatggaaaggagccagaagccaaaacagaagcataaccgttggtcgtggggaggctctctccatgggagccctagcatccacagtgcagatccagacaggcggtcagtttccaccatgaatctttcgaaatatgttgatcccgtcattagcaagcggctctcctcttcatctgcaactttactaaattctccagatagagctcgccgcctgcagctcagcccatgggagagcagcgttgttaacagactcctgacgcccacacattcgttcctgg

SEQ ID NO: 620 - DNA, 471 bp, Homo sapiens
ctggcgtgtagaatctccaggaagcctggctgcagcttcccatttggttacgaggttggagaaaaagtcaaagtcccctcctgggctgtcttcatcatactccgcagtcagactgggctggtagtaagctgccggtggaacacaatcatttgccctgggtgtccttggtcctgcccggctctctgtagtggaggctccccttggcatcaccttctctggcccttaggatctccccatttggagacagagccatttggatattttccccttgaacttctccatgacctgaagcgttccttccctggaggaactctttggttgcagggctaaacttagaggctgctagagtgtagtggttaagaacaggaacttgggtaccaggcgcctgaattttaatcagctccctcatttattaactctctgacttgatgcaagttacttaacctctctgtathgaattttcacatcttt

SEQ ID NO: 621 - DNA, 592 bp, Homo sapiens
aaaaataaggggtttgggaggccaagatctgacctattctgtagaaggactccttaggaaagtaacagttgagccaatctaaggatgctagatattcagtaggtcagtggaaaaaatcagtggttctcactgtggtcagtgggttattggtggtttcataataactggggactactcccagcactgagtggatgcagccagggagaacgatgtcctgcagtgtgtgggttagtgccacacaacgaagaattattctgtaccctgtacgactgtctaatgtcctgctggacatttaggtaggacctacagcttgtccgagagagtaactcatttgttttctctgagacaatctgtaatttgtcttgtcctattatccttaagtaaggtaatttcgctctttcttttcccatatacagattatgtacatagtctgttttgtctttaccctaacactggttttcattctagtgtcccccacccgtctagtttcattttcctgtacttgtttacaggaagtagcctctaatcggctcttaaatccaaacctactcattacaaggaagagtaaacatctgtctgtttcaaacagcgt

SEQ ID NO: 622 - DNA, 280 bp, Homo sapiens
aaagcctcagtagaagagtgcagagttacactgtcctgtttggggtgcccccctcccccttccgacctaagtgctgccaaggcttgtmagctctcartccctgccactgtcattttcatyctcccacagcgtcataccactttctgttttttcaaacccatcacatamgtgctggagcttggtaacsttwttagtggcttaatgttctmttttagaaattccagcacttctgtcacatatcaaataatacattcttcaaatrcacacataataataatac

SEQ ID NO: 623 - DNA, 505 bp, Homo sapiens
gtcgccccagaattcaccaaccggaacccccggaacctggagcttttatctgtagccaggaaagagcggggctggcggacggtgtttccctcccgtgagttctggcacaggttgcgagttataaggactcagcatcatgtagaagcacttgtggagcatcagaatggcaaggttgtggtttcggcctccactcgtgagtgggctattaaaaagcacctttatagtaccagaaatgtggtggcttgtgagagtataggacgagtgctggcacagagatgcttagaggcgggaatcaacttcatggtctaccaaccaaccccgtgggaggcagcctcagactcgatgaaacgactacaaagtgccatgacagaaggtggtgtggttctacgggaacctcagagaatctatgaataaatggaagcattaattgttttgaacatgtaaatataaatctgtcagccactacagccatcaaaagagagcatctggaagaacagccagcttg

SEQ ID NO: 624 - DNA, 449 bp, Homo sapiens
  misc_feature 446: n = A,T,C or G
ccaagaagacgatggtggagaggagggggagggcagcagggcaaagcctttggggagggtcagcaaaggggccccctgcccttggctaatggatccgagttagctcctccacaaccttgatgaggtcgtctgcagtggcctctcgcttcataccgctgccatcgtcatactgtaggtttgccaccacctcctgcatcttggggcggctaatatccaggaaactctcaatcaagtcaccgtcgatgaaacctgtggctggttctgtcttccgctcagtgtgaaaggatctccagaaggagtgctcgatcttccccacacttttgatgactttattgagtcgattctgcatgtccagcaggaggttgtaccagctctctgacagtgaggtcaccagccctgaagaagtgaaggaggcagtgagctgcagagagctcaaccccacagsnatg

SEQ ID NO: 625 - DNA, 479 bp, Homo sapiens
ctgagaatcaaactggagaacattccgaagccgttcttataagtgtctccatctctacctgggctgaaatggaatgtgcaaatgtagcccagcctggtccttgggtgttgtcagttgattgatgactgggagccaaagtggcatctcctttgacctaaacgggcgatgatgaaataaaactcaacagcctttctctcatcttgcattgtgagatgcgaaatagagcgtgtctctctgcctctcattttaggctgaggccgtccaaagcggccatgccccatgtttccactagatggcgctgacacttcaggcatcaaccctcatggcctctcagccttgcaaaggcagccacttaaagtcggtgtcctgtgtgggacaccaagctgagctgcagacacccagtaggcgcgaggcaaatgcgtcccattttaagaggcttgtatttatgagctctttgcttcctccctcccactatcttt

SEQ ID NO: 626 - DNA, 478 bp, Homo sapiens
aaaaacattacttgaattaggattacacaacaaaaactaaattctaagtgagcacaactatcgctgagaccctgaaatttcaggaaataaacatggttcaaaactcaaactgttcatcaaaataattacgcaggtcagccaccactgcagaaccatcactgctcagaggaattgagtcagcaatgactgatctcatcatctcttcattagcacataagcggttcaacttgggatacgcaaggagtctctgcagaggtacgaaaaatttatctccaacacagaagggtgtgggagagttctctatcttggccttctcaacctctgtgaagactggtccaaagcatgggacaggggcctttgagccaccaatgtctttgggcttatcaccccgttccccagcctgttctttccgccttggcaggtggctcactcttaagctttccacttgttgggacacctcattaaccaacacaagttt

SEQ ID NO: 627 - DNA, 549 bp, Homo sapiens
aaatcaagcctatggaacaaagatttctacgaaatacccagaaaaggcagattcatagagatagggagtaggtagtgattgcctagagctggggttgggaattgaaataaggattaagaataaatgtacctgagggatctcactggagggatgaaaatgttcttaaactgggttatggtgatggtgcatcacttggtaatgttactaagagtcatggaattacacctggaaatgggtaaattttatgaggtaaaaactcaataaagttgttacaaatactatgcatcttgggacatcatgtccattataaatacagaaatctttgacatacgtggagtgaccaatgacggctacatatgtctatcttagggaatgtaaattagtctacttaaggaaatttagtttaagttggttctgcttctcttctcaaggtaacgaatcaaacttcgggtaaaacactcctctttaaggataaagaagcagtcattaaggtggctgaggaggaacctctctcaaggatctttgctttattacatttgaaaatgtgca

SEQ ID NO: 628 - DNA, 174 bp, Homo sapiens
ctgaattctcaatgcagggtctaaaagctggtgttattgctgttattgtggttgtggtgatagcagttgttgctggaattgttgtgctggttatttccagaaagaagagaatggcaaagtatgagaaggctgagataaaggagatgggtgagatgcatagggaactcaatgcat

SEQ ID NO: 629 - DNA, 406 bp, Homo sapiens
gtgttgggcaggaagaacagcaccaacagggaggagagagaggggattgggtcccggctctaccacggaccagtcactttccccaggactcagttttgtcacctgtataatgggggaagcacaatccttgcctgactccttccaagagcctcaattaggcttcggtgagagagtgggtatggaagagctttgcaaactgtaaagtgcagtacacacatgcaggctagctgtggccctggggcccaggcccagcggggctctgcggagtgggtacagtaagtgttggcaatgaaaacactgcttgaggctgagcctggccctttgagcaccctcaggtcctccacatctgttcctcctctcaggtgcccacaacttccctggcaccttttaccctgggtggctgagg

SEQ ID NO: 630 - DNA, 293 bp, Homo sapiens
ccacaccctaagccttgcaaaagggcctcctgcaagggctggcccatggggtccccaccttcccagccagtgaggttagcatggttaggagtccacatgtgtgcaagtgcttgtgtggaggctcatgtatgcatgtgtgtatatgcaaagctgcacatgacaatgtgcatgccagtccagagttagatgtacctatgcagttgccctcaagcgaagggtcatatttggaaacaaggatggctctaaacatgtaagcgtgcatgtgggcatgtatgtatctggggcctaaggag

SEQ ID NO: 631 - DNA, 533 bp, Homo sapiens
aaataaggcttggggtttttcccggtcttttggggaacttgaaactgaggtgggactttccagaaactgttgctagtttcgctttatctgagtaccatctgttcttggccctgagccggggcccaggtgctcgaccacagatatcctgtttggcccctgtcccagttttgttcagccttattctttaactaaacttccttgtgacttttgagaactcagctctggtactttttcatgccttgcaaaatggcgttactgcagctagcttgctaagccttatggtggggtctttcattcccccctctttctggaaactgaataaaatcttttattcacgcgattctacttcttctggatctattgatttgagttggtgatactgttgggtcagaaccagggcctgcaccaccgaaattctgtcttttacaaactggaccaagcggttgagaatgcagggtccgaggagtaggattaataaaagtactatcagagggcccataatggtggatatcagggtcgtgaaccatggggac

SEQ ID NO: 632 - DNA, 230 bp, Homo sapiens
ctgctcggaaagctctggacagatgcagtgaaggctccttcctgctaaccacatttcctcgtcctgtgactgtggagcccatggaccagttagatgatgaagagggacttccagagaagctggttataaaaaaccagcaatttcacaaggaacgagagcagccacccagatttgcacagcctggctcctttgagtatgaatatgccatgcgctggaggcactcattgaga

SEQ ID NO: 633 - DNA, 514 bp, Homo sapiens
aaatatttaggttattaagaagtctaaaatgttacacagttagaggtagataacagtcccaagtttccatggaatctaataatttagtatctggacatcaaacagatcacaaactccttcgttatcatctaaattaaagttgtagtcatctgcctgggtaggagaaagccttaagagaggaaacacgtcagaagacattaactcatcaatgatatctccactaatagatcctgctgaagatatatctgtagctgatgtctgctacagagcctggcttctttcagagacatgttgctcaggcagattttgagttgccatgctggatttctgtggagtcactggagtcmaggactgggaggaaggctgtgtgaggtcatcaggtgggggaacaggaaaaaccacgggcttagatgaactcgactctttatttataagcagcacatggataggtcctgaatgactctttagattgatctggtatttcttttgtccattctgacccatttctggaatg

SEQ ID NO: 634 - DNA, 578 bp, Homo sapiens
  misc_feature 576: n = A,T,C or G
aaataaagcttggggtttttcccggtcttttggggaacttgaaactgaggtgggactttccagaaactgttgctagtttcgctttatctgagtaccatctgttcttggccctgagccggggcccaggtgctcgaccacagatatcctgtttggcccctgtcccagttttgttcagccttattctttaactaaacttccttgtgacttttgagaactcagctctggtactttttcatgccttgcaaaatggcgttactgcagctagcttgctaagccttatggtggggtctttcattcccccctctttctggaaactgaataaaatcttttattcacgcgattctacttcttctggatctattgatttgagttggtgatactgttgggtcagaaccagggcctgcaccaccgaaattctgtcttttacaaactggaccaagcggttgagaatgcagggtccgaggagtaggattaataaaagtactatcagagggcccataatggtggatatcagggtcgtgaaccatggggacctgttaaacagtccctcaaaccacccttgtcctgattcgaacnat

SEQ ID NO: 635 - DNA, 316 bp, Homo sapiens
ccatcagattgtcacagacttttataaccctttgatccctaccaacattaagtatgagtttggccctgccatctttattggctgggcagggtctgccctagtcatcctgggaggtgcactgctctcctgttcctgtcctgggaatgagagcaaggctgggtaccgtgcaccccgctcttaccctaagtccaactcttccaaggagtatgtgtgacctgggatctccttgccccagcctgacaggctatgggagtgtctagatgcctgaaagggcctggggctgagctcagcctgtgggcagggtgccggacaaagg

SEQ ID NO: 636 - DNA, 323 bp, Homo sapiens
ccagaggataacacttgtctcttaaaaactaagctaaaaagaacctagaaccttcaattgagcagttgtgaaaattgctaatggtgccaaggccaagcaaagagtttcagaaaatgactgagaaggagcgataacccccagaatgcaaaatcaggggcatcattatccggtgcttgaacaaggagctccgctctacaactggtttttttaggacttgtgaggaacacagcaacggaaatccatccacaaaggatgcagtgccccaacttgtactgcgcctgaatagtcatgtgataatttactgaagaaatctagtgtacttt

SEQ ID NO: 637 - DNA, 456 bp, Homo sapiens
ccttaaaaacagaagagaacaagattaaagtcgttgcattgaaaataacaaacaatatcaatgttttaatcaaggatctcttccacattcctccttcttataagagcacagtaacactatcctggaaacctgtacaaaaggttgagattgggcaaaagagagccagtgaagatacaacttcaggttcaccacccaagaaatcttcagcaggaccaaaaagagatgccaggcagatttataaccctcccagtgggaaatatagcagcaatttgggcaactttaattatgagcagagaggagccttcaggggaagtagaggtggccgaggttggggcacacgaggaaatcgtagtcggggaagactctactgaataagacatcagcattcttcagcattgtcatgagcttaatatacttaaattctactactcattggattgccggggatgtcccttt

SEQ ID NO: 638 - DNA, 526 bp, Homo sapiens
aaatcctgagtcaagccaaaaaaaaaaaaaccaaaacaaaacaaaaaaaacaaataaagccatgccaatctcatcttgttttctgcgcaagttaggttttgtcaagaaagggtgtaacgcaactaagtcatagtccgcctagaagcatttgcggtggacgatggaggggccggactcgccatactcctgcttgctgatccacatctgctggaaggtggacagcgaggccaggatggagccgccgatccacacggagtacttgcgctcaggaggagcaatgatcttgatcttcattgtgctgggtgccagggcagtgatctccttctgcatcctgtcggcaatgccagggtacatggtggtgccgccagacagcactgtgttggcgtacaggtctttgcggatgtccacgtcacacttcatgatggagttgaaggtagtttcgtggatgccacaggmytccatgcccaggaaggaaggctggaagagtkyctcagggcagcggaaccgctcattgccaatggtgatg

SEQ ID NO: 639 - DNA, 308 bp, Homo sapiens
ccagttttatccgagactctaaataagcaccgagctgataatcggattgtagagcgttgttgcaggtgcctgcgctttgctgttcgctgtgtaggcaaaggatctgcagcactgctgcagccactagtcacacagatggtgaatgtgtaccacgtacatcagcattcctgcttcctgtaccttggcagtatccttgtggatgaatatggcatggaagaaggctgtcggcagggactgctagacatgctccaggcactgtgcatccccacctttcagctcctagaacagcagaatggtctccagaatca

SEQ ID NO: 640 - DNA, 505 bp, Homo sapiens
ctgaatcgcgcagaatttgaagatcaagatgatgaagccagagttcagtatgagggttttcgacctgggatgtacgtccgcattgagattgaaaatgttccctgtgaatttgtgcagaactttgacccccattaccccattatcctgggtggcttgggcaacagtgagggaaatgttggctacgtgcagatgcgtctgaagaaacatcgctggtataagaaaatcctcaagtcccgagatccaatcatattttctgtagggtggaggaggtttcagaccatcccactgtattatatcgaagaccacaatggaagacaaaggcttctaaagtataccccacagcacatgcattgcggagcagccttttggggccctatcactccacagggaactggtttcttggcaatacagtctgtcagtggcataatgcctgattttcggatagctgctacaggagttgtccttgatctggataaatccataaaaattgtgaagaaattaaagc

SEQ ID NO: 641 - DNA, 567 bp, Homo sapiens
ccttctaattagcatcagaaagttcctggattcccaggcacgcctcctgaaaaagctgagagatatgtctctttccagtcttcttgggtgaggctaggttgcaagctctgggctgttcaaaggttgccagaatctctccattggagggatagaagcagtgtccctattctgacttgtcagagagtgagcttgtgacccttgaaaggtggtgggtatcccttctcatcccctcggacctccacagttgatgcgtatgtctcccaggggaattaggtcacttaactcaagagcaatgtttgcccaggagcaagcaatgctggggagctttcctctagattggaaatggttcttgttgccctaccaggaaaagaattaagaaaacaaccctaaccattgtctcagtactttgtactgattgaagaaaaccacctctctgacaagcgctaatagcatctactacatttaatatcatagattcttatttagcaagtgagctggattcgttgcaaacattcacaacttccattcagagaggctggcagatgtcagatggaagaaaaaccccgg

SEQ ID NO: 642 - DNA, 428 bp, Homo sapiens
  misc_feature 423: n = A,T,C or G
aaatggcaacagcccatctgactgggcagcttgacagttcagaatacttttgcaatgattttttaacgcaaagacactaaaatgatccggtcatgcaatgttcatcttatgcattctgcatctctttgccaatcttgtagctaaggatcttgttccaatcaatcttagtgcgtgtaactggcaactgtcgacgtaaggctttgaaagtagtgtccgacattgtctgataattctcactgatggcagtctggtattcattttctgcagcttctacaatctttataaattcttttgctgtttgcacttcattagacactgttagggaatcttgtatatctttatgactcactagctgaacattaccatcttcataataatgaacctgaattttsaagatgccaaccacttgagtggttgaagganwgatt

SEQ ID NO: 643 - DNA, 449 bp, Homo sapiens
cctgggtgcttcctaagagagcccaaaagaagccaacagaaggcaaaagaaaggctagagcattctctgcacaggattttgaatgtttataataacatcaaactatctgcttgcatcagaggccatgctgtctcaaagcagcccctcctccactctccctcctttacagacaaaagtcctataaactgacaaaaccttaaaattaaacggaaaatgaaatttaccttaagccaactaaatacatggagctgggtcaggtttaagtcaggtctgcttttgtcacattagctatggtcttctgaagactggagtatgtttaagataatattcatgctttatagccgtgcttttttaactctgcacttgccaattcagttaccttctcctatgaagtttgcccttcaacaatgagattagtaggttgattaggctggtggagacaatcatgt

SEQ ID NO: 644 - DNA, 582 bp, Homo sapiens
ggaatttggcttcggcttcagcttcagcccaggaggagggatacgtttccacgataacttcggctttgatgacctagtacgagatttcaatagcatcttcagcgatatgggggcctggaccttgccttcccatcctcctgaacttccaggtcctgagtcagagacacctggtgagagactacgggagggacagacacttcgggactcaatgcttaagtatccagatagtcaccagcccaggatctttgggggggtcttggagagtgatgcaagaagtgaatccccccaaccagcaccaaactggggctcccagaggccatttcataggtttgatgatgtatggcctatggacccccatcctagaaccagagaggacaatgatcttgattcccaggtttcccaggagggtcttggcccggttctacagccccagcccaaatcctatttcaagagcatctctgtgaccaagatcactaaaccagatgggatagtggaggagcgccggactgtggtggacagtgagggccggacagagactacagtaacccgacacraagcagatagcagtcctaggggtgatcc

SEQ ID NO: 645 - DNA, 341 bp, Homo sapiens
ccaagtggggtgagggagacccacgctggatcgtggaggagcgggcggacgccaccaacgtcaacaactggcactggacggagagagatgcttcaaattggtccacggataagctgaaaacactattcttggcagtgcaggttcaaaatgaagaaggcaagtgtgaggtgacggaagtgagtaagcttgatggagaggcatccattaacaatcgcaaagggaaacttatcttcttttatgaatggagcgtcaaactaaactggacaggtacttctaagtcaggagtacagtacaaaggacatgtggagatccccaatttgtctgatgaaaacagcgtggat

SEQ ID NO: 646 - DNA, 445 bp, Homo sapiens
ccacatatatgcgaatctataagaaaggtgatattgtagacatcaagggaatgggtactgttcaaaaaggaatgccccacaagtgttaccatggcaaaactggaagagtctacaatgttacccagcatgctgttggcattgttgtaaacaaacaagttaagggcaagattcttgccaagagaattaatgtgcgtattgagcacattaagcactctaagagccgagatagcttcctgaaacgtgtgaaggaaaatgatcagaaaaagaaagaagccaaagagaaaggtacctgggttcaactaaagcgccagcctgctccacccagagaagcacactttgtgagaaccaatgggaaggagcctgagctgctggaacctattccctatgaattcatggcataataggtgttaaaaaaaaaataaaggacctctgggctacaaaaaaa

SEQ ID NO: 647 - DNA, 546 bp, Homo sapiens
ccagactggtctccaactcctgacctcaggcagtctgcccgcctcagcctcccaaagtgctgggattacaggtgtgagccaccgcacccgggctcctgtaatgaactattataaacaccaccacctgtgctcactggttctctcagtatgctagcaactgagttaattccaagtcaaaccatgggactgttttgttccaccccaacctcatagtgacctatcactccagcctcacccctacccagatgttgataggaccaggagaagcctttaggaagtgttagtatgtagtgtgggggcttcaaacccatgaaagattaaatgagctgcatgcaacttctggtacagtcatgattgctaaggcaatttgctaatctgccccgattgggcgtgtcctcagggcacatttgggaggttataatttgcaactatgtttattcagctacctccaatctttgcacagatccgaacccacaactccctgaagaacagaatactatgctttttagtcgggatgtctttatgaaagcagtactcctaactgac

SEQ ID NO: 648 - DNA, 580 bp, Homo sapiens
  misc_feature 480: n = A,T,C or G
attttcagcatgcctctgaagatgcaaggaagaccataaatcagtgggtcaaaggacagacagaaggaaaaattccggaactgttggcttcgggcatggttgataacatgaccaaacttgtgctagtaaatgccatctatttcaagggaaactggaaggataaattcatgaaagaagccacgacgaatgcaccattcagattgaataagaaagacagaaaaactgtgaaaatgatgtatcagaagaaaaaatttgcatatggctacatcgaggaccttaagtgccgtgtgctggaactgccttaccaaggcgaggagctcagcatggtcatcctgctgccggatgacattgaggacgagtccacgggcctgaagaagattgaggaacagttgactttggaaaagttgcatgagtggactaaacctgagaatctcgatttcattgaagttaatgtcagcttgcccaggttcaaactggaangagagttacactctcaactccgacctcgcccgcctaggtgtgcaggatctctttaacagtagcaaggctgatctgtctggcatgtcaggagccagagata

SEQ ID NO: 649 - DNA, 435 bp, Homo sapiens
ctgaaaatgaagttaccattcctaggccaaatttttagacaaagctttctaaaaccatctttataaagtaaattcagatatgcttacaataaaaagacataaaagattcatcctgagatgaattctgagtcaataactaaaaaccatttctaccagtgcatcactaccatgtaatccattctacgcaagctctacaaatattgagtcaaatcctgtctgtcagaaaatgaagacccaataagtttgccgaagtattcagtacaagaggccatttgtcttgcctttttctgacatgtgcatactataaaatcacaggtagccaacatttagtatcagtaaaaaacaactacgtttgttcacctgtttggcatagggagaaaacaatgtatctcatagcattaaatgatacagccttaacacatatgatgctcatat

SEQ ID NO: 650 - DNA, 425 bp, Homo sapiens
ctgctttaggtgaccattaaaaaacaactccccaatccttactgttcaacatgtacttgaaaacatgcagcagcatggtacagtttattaaatttataaatatcagtacctgtaataaaatataaaatactgactattcctttttcaaatattaagtctctgaatgcttcattcatcctttggtttcaaacccatacaatgcactcatattacattgtagatttcgaatggagacagaacactgtacatctgttggggaaggtggggtgctgtaggaataccaaagcactacatcatagaaagtaaacgttgaagcaaaaatactttctgaatatatactgtacattatgtaaacacacattcagaataagaatcaacacaggccaaaatattgttttctaggaaaccagaatcttctttctttt

SEQ ID NO: 651 - DNA, 267 bp, Homo sapiens
aaagaatcagcaaaatttcaaataaaaaattatgaaaatattatcctcattagttcatttagtcccatgaaattaattattttctctgcttgatcttggtggacagtttcatgaagctgtcagttagttcattaaagttttggaaattctcagacagtgcagtggtatcagaacttgtattcaagagtacaggtcagagtcttcttttcttttctttttgagatggagtcttgctctgttgccagactggagtgcagtggtgcgatc

SEQ ID NO: 652 - DNA, 498 bp, Homo sapiens
aaaaacaattcttaaatacaaatctgttaaagaaaaaaaaagatggtaagcataaaaaagttcttttatgcccaaagtccaatttgaggcagtttacattatggctaaatctttcagtctcaagactcagccaaggttgtgaggttgcatttgatcatgcatttgaaacaagttcataggtgattgctcaggacatttctgttagaaggaatcgttttccttacttttccttacgcacaagagttccgtagctgttcaagtttgtgtttcaactgttctcgtcgtttccgcaacaagtcctcttcagaaatgagcttttgctcctctgcttggacggacaggatgtatgctgtggcttttttaaggataactaccttgggggccttttcattgttttccaactccgggatctggtcacgcagggcaaaaaagctccgttttagctcgttcctcctctggcgctccaagacgttgtgtgttcgcctcttgacattctcc

SEQ ID NO: 653 - DNA, 575 bp, Homo sapiens
aaaagatgcctttttctgcctgagactccaccccaccagtcagcctctctttgcctttgagtggagagatccagaaatgggaatctctggacaattgacctggaccagactcccacagggtttcaaaaacagtcccaccctgtttgatgaggcattgcacagagacctagcagacttccggatccagcacccagacttgatcctgctacagtacgtggatgacttactgctggccgctacttccgaactagactgccaacaaggtactcgggcccttctacaaaccctaggggacctcggataccgggcctcggccaagaaagcccaaatctgccagaaacaggttaaatacctggggtaccttctgagggagggtcagagatggctgactgaggctagaaaagagactgtgatggggcaacccgttccaaagactcctcgacaactaagggagttcctagggacggcaggcttctgccgcctctggatccctgggtttgcggaaatggcggcccccttgtatcctcttaccaaaacggggactctgtttaattggggcccagaccagcaaaagg

SEQ ID NO: 654 - DNA, 477 bp, Homo sapiens
gcgtagacgagttaagtcctggtctgcgtggaggtcgacgactccgtcgcagactacggacctgtctgggtctcagccgccaaagaccccgtccggtaggaagtactagccggacatcatgagtggctgtcgggtattcatcgggagactaaatccagcggccagggagaaggacgtggaaagattcttcaagggatatggacggataagagatattgatctgaaaagaggctttggttttgtggaatttgaggatccaagggatgcagatgatgctgtgtatgagcttgatggaaaagaactctgtagtgaaagggttactattgaacatgctagggctcggtcacgaggtggaagaggtagaggacgatactctgaccgttttagtagtcgcagacctcgaaatgatagacgaaatgctccacctgtaagaacagaaaatcgdcttatagthkagaatttatcctcaagagtcag

SEQ ID NO: 655 - DNA, 182 bp, Homo sapiens
aaaagtcatatacaaagtttttatgtttttcgtttgttgaatcctcttgctgcctacccctttccccatcccaagattttctttacaaggaactaagcatcattcactcatgaccttggggtatgagagaaagagagtcagtctgtgtgtgggtgtatctgtatgtgtaggggaggaagggg

SEQ ID NO: 656 - DNA, 370 bp, Homo sapiens
gaaaaagtcaaaggaaaggtcagacgaaaagtgactggaactgaaggatccagctcaactctggtggattacaccaggtagctgagtgtagggggtgggtgtggaactttgttgggagaaggattttcttcagttttatccatgcttgtgctttttatattaattatgaatgctgatctagggaagtaggctggttttatgtagtcttttgttgtctttgaagaagggaattgccaaagacaaggttgtaaatagattttgggggtgagccacatttgtgttgatacaatcataatcttaaattgtgtgtcttccttagggcagaataagttttttgyttttttaatgttaaaaggacatttghgtttaa

SEQ ID NO: 657 - DNA, 460 bp, Homo sapiens
ctgttacccaattggttgacaggactaggattgtgattgtcccttctctaaatccagatgggcgagagagagctcaagagaaagactgtacttcaaaaataggacaaacaaatgctcgtggcaaagatttggatacagacttcacaaataatgcctcccaacctgagaccaaagccatcattgaaaatttgattcaaaaacaggactttagtctttctgttgccttagatggtggttccatgctggtcacatatccttatgacaagccagtacagacagtggaaaataaagagactctgaagcatttggcatctctttatgcaaataatcatccatccatgcacatgggtcagcccagttgcccaaataaatcagatgagaatattccaggaggagtaatgcgtggagcagaatggcatagtcacctgggcagcatgaaggattatagtgtcacctatgg

SEQ ID NO: 658 - DNA, 288 bp, Homo sapiens
ctggccctccatcaccaatgcggcagtccttgccgtgacatgctgagctctggaaggagcgaaggaggggctgcggtgttcagacaagagcctggacacagtgctgctgacagccaggggaggctctcagcgctgggaggggcgacagataaagcgagacagaccaaggagtaaatgccttgggatctgctctttgggaaggaagaggatggaagtattaacagcagacgggtctctccaagtctgggtgcctacgcagggggcaggtgggaggggaagggagaggta

SEQ ID NO: 659 - DNA, 528 bp, Homo sapiens
ccatgcctaatatagcagtaggacagaatgtgacagtgacagaaagagttctagcacctgcttccactctgcaatccagttaccagattcccactgaaaattctatgacggctaggaacaccacggtgtctggagctggagtccctggccctctgccagattttggtttagaggaatctggtcattctaattctaccataaccacatcttccaccagagttaccaagcatagcactgtacagcattcttactcctaaacagcagtcagccacaaactgacccagagtttaattagcagtgactaatttcatgtttccaatgtacctgatttttcatgagccttacagacacacagagacacatacacattgatcttaaaatttttctcagtcactgatatgcaaaggaccacactgtctctgcttccaggagtattttagaaatgttccacaatttactgaagacatagagatgatgctgctgcttaggtgccttttagcaagctatgcaaacaatcctgataaaaca

SEQ ID NO: 660 - DNA, 450 bp, Homo sapiens
gggccgtcccgctcctaaggcaggaagatggtggccgcaaagaagacgaaaaagtcgctggagtcgatcaactctaggctccaactcgttatgaaaagtgggaagtacgtcctggggtacaagcagactctgaagatgatcagacaaggcaaagcgaaattggtcattctcgctaacaactgcccagctttgaggaaatctgaaatagagtactatgctatgttggctaaaactggtgtccatcactacagtggcaataatattgaactgggcacagcatgcggaaaatactacagagtgtgcacactggctatcattgatccaggtgactctgacatcattagaagcatgccagaacagactggtgaaaagtaaaccttttcacctacaaaatttcacctgcaaaccttaaacctgcaaaattttcctttaataaaatttgcttgtttt

SEQ ID NO: 661 - DNA, 443 bp, Homo sapiens
ccaaggtcagaggctgatgcaacaggccctcttctccccagggccaggctcctgtccagcctgggcactgcccagagtgatggcattggtccggatgctgttctgtctctgcttggacaccttcgcaaagatttctttcaggacagtctcaaaggctagctcaacattggtagagtccagggctgaggtctccaggaagagcagtccattgttttcagcgaacattcgggcctcctcagtgggcacttcccgggcctggctgaggtcacttttgttacccacgagcatgacgacgatcgtggcttcagcatggtcatagagctccttcagccatcgctccaccacagcataggtctggtgcttggttaggtcaaacaccaggagggcccccactgcaccacgatagtacgccgaggtgatggctcggtaccgctccaggccag

SEQ ID NO: 662 - DNA, 543 bp, Homo sapiens
ctgcaggcccagagcctggagcatgaggaggaggtggagcatctcaaggctcagctcgaggccctgaaggaggagatggacaaacagcagcagaccttctgccagacgctactgctctccccagaggcccaggtggaattcggcgttcagcaggaaatatcccggctgaccaacgagaatctggaccttaaagaactggtagaaaagctggaaaagaatgagaggaagctcaaaaagcaactgaagatttacatgaagaaagcccaggacctagaagctgcccaggcattggcccagagtgagaggaagcgccatgagctcaacaggcaggtcacggtccagcggaaagagaaggatttccagggcatgctggagtaccacaaagaggacgaggccctcctcatccggaacctggtgacagacttgaagccccagatgctgtcgggcacagtgccctgtctccccgcctacatcctctacatgtgcatccggcacgcggactacaccaacgacgatctcaaggtgcactccctgctgacctcc

SEQ ID NO: 663 - DNA, 507 bp, Homo sapiens
ctgcttaactctcccgaaactaaacttgagcctccattatggcatgctgaatttaccaaagaagaattggttcagaagctcagttccaccacaaaaagtgcagatcacttaaacggcctgcttcgggaaacagaagcaaccaatgcaattcttatggagcaaattaagcttctcaaaagtgaaataagaagattggaaaggaatcaagagcgagagaagtctgcagctaacctggaatacttgaagaacgtcttgctgcagttcattttcttgaaaccaggtagtgaaagagagagacttcttcctgttataaatacgatgttgcagctcagccctgaagaaaagggaaaacttgctgcggttgctcaaggtgaggaagaaaatgcttcccgttcttctggatgggcatcctatcttcatagttggtctggacttcgataggttgatggaaggaatatttttattaaccaaatagaatctatttacaaaaatggttcacgtatatta

SEQ ID NO: 664 - DNA, 463 bp, Homo sapiens
aaaatgatgcaagcagaagaggcaccaaaaacccctctgcagaagagcatggacctcttaggaaaacaactttccttttactcctttggtataataggaatcatcatgttggttggctggttactgggaaaagatatcctggaaatgtttactattagtgtaagtttggctgtagcagcaattcctgaaggtctccccattgtggtcacagtgacgctagctcttggtgttatgagaatggtgaagaaaagggccattgtgaaaaagctgcctattgttgaaactctgggctgctgtaatgtgatttgttcagataaaactggaacactgacgaagaatgaaatgactgttactcacatatttacttcagatggtctgcatgctgaggttactggagttggctataatcaatttggggaagtgattgttgatggtgatgttgttcatggattctataacccag

SEQ ID NO: 665 - DNA, 430 bp, Homo sapiens
ctgaaccctcgtggagccattcatacaggtccctatttaaggaacaagtgattatgctacctttgcacggttagggtaccgcggccgttaaacatgtgtcactgggcaggcggtgcctctaatactggtgatgctagaggtgatgtttttggtaaacaggcggggtaagatttgccgagttccttttactttttttaacctttccttatgagcatgcctgtgttgggttgacagtgagggtaataatgacttgttggttgattgtagatattgggctgttaattgtcagttcagtgttttaatctgacgcaggcctatgcggaggagaatgttttcatgttacttatactaacattagttcttctatagggtgatagattggtccaattgggtgtgaggagttcagttatatgtttgggattttttaggt

SEQ ID NO: 666 - DNA, 560 bp, Homo sapiens
aaagttagagaattttccgtcacagatgcagttccttttccaatatctctgatctggaaccatgattcagaagatactgaaggtgttcatgaagtctttagtcgaaaccgtgctgctcctttctccaaagttctcacctttctgagaagggggccttttgagctagaagctttctattctgatccccaaggagttccatatccagaagcaaaaataggccgctttgtagttcagaatgtttctgcacagaaagatggagaaaaatctagagtaaaagtcaaagtgcgagtcaacacccatggcattttcaccatctctacggcatctatggtggagaaagtcccaactgaggagaatgaaatgtcttctgaagctgacatggagtgtctgaatcagagaccaccagaaaacccagacactgatgcaaatgaaaaaaaagttgaccagcctccagaagctaaaaagcccaaaataaaggtggtgaatgttgagctgcctattgaagccaacttggtctggcagttagggaaagaccttcttaacatgtatattgagacaga

SEQ ID NO: 667 - DNA, 250 bp, Homo sapiens
gtactatctcatatcataatagggatgactaagtacttgacaactactttctaacgaacttaacaaaaagtgactacttgaagattacatttacaacagaaaggctaacattctctgcagagctctcattttatcatgaaatgtggacaatcaggaacacgtggatgagtggtatcaagaaaaagggcatttcaaaatatttccacttttattaaaggttttgacaatgaagatttcataaaatgtcttt

SEQ ID NO: 668 - DNA, 341 bp, Homo sapiens
ctagggggctttcctggaccccctaccctgttcagcatacggacagagccccccgcttcccatggctccttccacatgatatccgcccggtcctctgagcctttctactctgatgacaagatggctcatcacacactccttctgggctctggtcatgttggccttcgaaacctgggaaacacgtgcttcctgaatgctgtgctgcagtgtctgagcagcactcgacctcttcgggacttctgtctgagaagggacttccggcaagaggtgcctggaggaggccgwgcccaagagctcactgaagccttgcagatgtgattgghgccctctggcaccctgac

SEQ ID NO: 669 - DNA, 62 bp, Homo sapiens
kcctcatggtgagtgaaatggakakccatcctccctcgcagggtcctggggacggggagcgg

SEQ ID NO: 670 - DNA, 242 bp, Homo sapiens
aaataaggcttggggtttttcccggtcttttggggaacttgaaactgaggtgggactttccagaaactgttgctagtttcgctttatctgagtaccatctgttcttggccctgagccggggcccaggtgctcgaccacagatatcctgtttggcccctgtcccagttttgttcagccttattctttaactaaacttctttgtgacttttgagaactcagctctggtactttttcatgccttg

SEQ ID NO: 671 - DNA, 498 bp, Homo sapiens
ctgccatgtaccaggccaccaggatttttgcctctaacctgaaggaacgcatggcccagcgcttctacaaccttgtcctgctccctcgagtacgagatgacgttgctgaatacaaacgactcaacttccatctctacatggctctcaagaaggcccttttcaaacctggagcctggttcaaagggatcctgattccactgtgcgagtctggcacttgtaccctccgggaagccatcattgtgggtagcatcatcaccaagtgctccacccctgtgttgcactccagtgcggccatgctgaaaattgctgasatggaatacagcggtgccaacagcatcttcctgcgactgctgctggataagaagtatgcactgccttaccgggtgctggatgccctagtcttccacttcctggggttccggacagagaagcgtgaactgcctgtgctgtgghaccagtgcctcctgactttggtccagcgctacaaggccgmyttgg

SEQ ID NO: 672 - DNA, 521 bp, Homo sapiens
gagaggattagatctgctgttcctaaaagaaggaggattatgtgctgccctaaaagaagaatgctgtttctatgcagaccacactggcgtagtaagggatagcatggctaagctaagagaaaggctaaaccagaggcaaaaattgttcgaatcaggacaagggtggtttgagggactgtttaacaggtccccatggttcacgaccctgatatccaccattatgggccctctgatagtacttttattaatcctactcctcggaccctgcattctcaaccgcttggtccagtttgtaaaagacagaatttcggtggtgcaggccctggttctgacccaacagtatcaccaactcaaatcaatagatccagaagaagtagaatcgcgtgaataaaagattttattcagtttccagaaagaggggggaatgaaagaccccaccataaggcttagcaagctagctgcagtaacgccattttgcaaggcatgaaaaagtaccagagctgagttctcaaaagtcacaa

SEQ ID NO: 673 - DNA, 592 bp, Homo sapiens
  misc_feature 584: n = A,T,C or G
ctgcggagcgttatgaaagtagaaagttccgaaaatgttcctagccccacgcatccaccagttgtaattaatgctgcagatgatgatgaagatgatgatgatcagttttctgaggaaggtgatgaaaccaaaacacctaccctgcaaccaactcctgaagttcacaatggattacgggtgacttctgtccggaaacctgcagtcaatataaagcaaggtgaatgtttgaattttggaataaaaactcttgaggaaattaagtcaaagaaaatgaaggaaaaatctaagaagcaaggtgagggttcttcaggagtttccagtcttttactccaccctgagcccgttccaggtcctgaaaaagaaaatgtcaggactgtggtgaggacagtaactctctccaccaaacaaggagaagaacccttggttagattgagtcttactgagagactggggaaacgaaaattttcagcaggcggtgacagtgatcctccattaaagcgtagcctggcacagaggctagggaagaaagttgaagctccagaaactaacattgacaaaacaccaaagaaagctcaagtttccangtctctta

SEQ ID NO: 674 - DNA, 560 bp, Homo sapiens
  misc_feature 498: n = A,T,C or G
ctgcacggtccccgcctctcatccatttggtctgtttgcaagttactagatcatacaaaaataaccgctacaaattctctgtatctggcatataaaaactgagcaaaaagtatctcttaaagcaaaacatctcagaaaaaatacaacacaggtttaacttctgcagtactttgttcatataaaacactagtaaaataggcttcttaaaaattaaatagtgaaataccaaccaaattatatacattgttacagtacaagtgaatgaggcaaaatatccagttcttagtttcccaggtgggtgggggtggccttcagtgcgtggcacagagggggtgacaggaaggccacgttccgatgtcacagtcagcgcagaaagaggcttgcagcgggacaaacagatggaaagaactgagtcacacagggaagaccaggggctcctttgaggaagagtgaggtcatgtttttattgcttgctaatccgaggttttccctggcccngatgcccctctaggtagcctggatcccaaatgctgcagcccacgtagcgctaatccatgtca

SEQ ID NO: 675 - DNA, 534 bp, Homo sapiens
ctgtccaatggcaacaggaccctcactctattcaatgtcacaagaaatgacacagcaagctacaaatgtgaaacccagaacccagtgagtgccaggcgcagtgattcagtcatcctgaatgtcctctatggcccggatgcccccaccatttcccctctaaacacatcttacagatcaggggaaaatctgaacctctcctgccacgcagcctctaacccacctgcacagtactcttggtttgtcaatgggactttccagcaatccacccaagagctctttatccccaacatcactgtgaataatagtggatcctatacgtgccaagcccataactcagacactggcctcaataggaccacagtcacgacgatcacagtctatgcagagccacccaaacccttcatcaccagcaacaactccaaccccgtggaggatgaggatgctgtagccttaacctgtgaacctgagattcagaacacaacctacctgtggtgggtaaataatcagagcctcccggtcagtcccaggctgcag

SEQ ID NO: 676 - DNA, 598 bp, Homo sapiens
ctgaatcaaattaaaatgtacatgtaaaaaatgtgttagataatgggaggcaggacagagagagagccaggtgagtggggagtcacgctgaggcaggacacagaggcaatcagactagcatatggcgtttcctatggagggcaagatggtcagaacgggagaagctgcggtcacagtccgggcactggaaaggtttgattccagtatgttttcggaaatgtcttgttagttcatcagaccgagcaaacttccatgtgcacccttcccatgtacatttgtagggtttttctcctgtgtgtgttcttctgtgtgctttcaagtgggagcttttagtgtacactttgttgcatccatcataatcacatctgtgtatcctccgcttcctttgagtatccggggattccacaggtaaaggtctcttcccaggctgcacgatgaccgaagggtgattctcttgcaacaatgcttgcgggggggacactgagttcattaaggggggtgacatttcttcaggataataatctgtcctctgtggttcgatcccaggttctattttaatttttttctgtgatataggcttctcatatgattcaattac

SEQ ID NO: 677 - DNA, 552 bp, Homo sapiens
ccactcggcagagcagaaggtgacccagcgtctcttcttgacgtccacggactggttggacgcgatgcgctggacgtctccccagtgttctagggtcagactcagaggggtggttacggtctgtcccatatttttagaaacggtccaaaacaataacgaacagacaaatgacaaaacaacactgagacagacaagacgcgcggcgcggtttcggcgaaaaaccgaaagcaaaaattcagatggaggcggcgagggcttggacctctcgtctcctaaaagaaccacgtacccctccgacaaaggaggggctccaaatagtccgaatcggtcaggactcggacttactgattgggccacccagcgggcccctgatgcctctgagacgtctcccagggctgcggtcgggaatacgaactcgtcagttcttccacggaaccgccagatacagatctagttagctaactagtacagattcagacgcaggcgcaaaaagtagatgccggcacacacacacacgcacaaagacagagacggagacaaaacgatcgctgg

SEQ ID NO: 678 - DNA, 472 bp, Homo sapiens
aaatgtagataatatgaagcagatgatatttagagggggacttagtcatgcattgagaaagcaagcatggaaatttcttctgggttattttccctgggacagtaccaaggaggaaagaacccaattacaaaagcaaaaaactgatgaatacttcagaatgaaactgcagtggaaatccatcagccaggaacaagagaaaagaaattcgaggttaagagattatagaagtcttatcgaaaaagatgttaacagaacagatcgaacaaacaagttttatgaaggccaagataatccagggttgattttacttcatgacattttgatgacctactgtatgtatgattttgatttagaaatttgttgtaagaactgatgccggggctgggtgcggaggctcacgcctgtaatcccagcacttcaggaagtcaaggcaggtggatcacctgaggacaggagttcaagaccagcctgg

SEQ ID NO: 679 - DNA, 494 bp, Homo sapiens
ccttatttctcttgtcctttcgtacagggaggaatttgaagtagatagaaaccgacctggattactccggtctgaactcagatcacgtaggactttaatcgttgaacaaacgaacctttaatagcggctgcaccatcgagatgtcctgatccaacatcgaggtcgtaaaccctattgttgatatggactctagaataggattgcgctgttatccctagggtaacttgttccgttggtcaagttattggatcaattgagtatagtagttcgctttgactggtgaagtcttagcatgtactgctcggaggttgggttctgctccgaggtcgccccaaccgaaatttttaatgcaggtttggtagtttaggacctgtgggtttgttaggtactgtttgcattaataaattaaagctccatagggtcttctcgtcttgctgtgtcatgcccgcctcttcacgggcaggtcaatttcactggttaaaagtaagagacag

SEQ ID NO: 680 - DNA, 551 bp, Homo sapiens
ccagtaccggcacctctgagtatgccgcttatgaccagaacatcacacctttgcacacggacttctctgggagcagcactgaaagaatttgaaactgacttttggagctttccttcttttttcatttcaactgaaaatgctttaggtaaaaacctttccagtatgttcacctctagaatagccacccaaagaccttcctgaggctgcctcagaagcaccacttgctgttttgaatgactctactagtatgagaaggatgtgaaggtggttggctggttgggctttaacttcctgggattcataatttttaagcttggaagatagctgctgttcccatgatgggcacatttcctgagaagcttgaatgactgatgagcatagagcacccctgccttcctcaggaaacctgaccggcaggggctctctggcttcctgaaagcttcacctcttccctcgtttatatctcaactgtaagggcattttcaagcttctgttcatggaatgagcaactcagactgtctggagcttgctgagtacaaacacaccaccac

SEQ ID NO: 681 - DNA, 452 bp, Homo sapiens; identical to SEQ ID NO: 498

SEQ ID NO: 682 - DNA, 546 bp, Homo sapiens
gggccccctaatagttatagggatcttggtgagggcaggagcctcggtacaacgtgacagccctcaccaggtcttcaatgtcacttggagagttaccaacctaatgacaggacaaacagctaacgctacctccctcctggggacgatgacagacaccttccctaaactatattttgacttgtgtaatttagttggagaccattgggatgacccagaacccgatattggagatggttgccgctctccggggggaagaaaaaggacaagactgtatgacttctatgtttgccccggtcatactgtaccaatagggtgtggagggccgggagagggctactgtggcaaatgaggatgtgagaccactggacaggcatactggaagccatcatcatcatgggacctaatttcccttaagcgaggaaacactcctaaggatcagggcccctgttatgattyctcggtctccagtggcgtccagggtgccacaccggggggtcgatgcaaccccctagtcttagaattcactgacgcgggtaaaaaggccag

SEQ ID NO: 683 - DNA, 549 bp, Homo sapiens
ccttctaattagcatcaaaaagttcctggattcccaggcacgcctcctgaaaaagctgagagatatgtctctttccagtcttcttgggtgaggctaggttgcaagctctgggctgttcaaaggttgccagaatctctccattggagggatagaagcagtgtccctattctgacttgtcagagagtgagcttgtgacccttgaaagatggtgggtatcccttctcatcccctcggacctccacagttgatgcgtatgtctcccaggggaattaggtcacttaactcaagagcaatgtttgcccaggagcaagcaatgctggggagctttcctctagattggaaatggttcttgttgccctaccaggaaaagaattaagaaaacaaccctaaccattgtctcagtactttgtactgattgaagaaaaccacctctctgacaagcgctaatagcatctactacatttaatgtcatagattcttatttagcaagtgagctggattcgttgcaaacattcacaacttccattcagagaggctggcagatgtcag

SEQ ID NO: 684 - DNA, 524 bp, Homo sapiens
aaaaagtttcaggtcacaacccttgcagaaaacactgatgcccaacacactgattcgcggtccaggaaacacgggtcttccaagttccaaggggctggggttccccaacgatcaagttcctgtgctgtaatcaagagggtcctttggactggatagggagcacttgggagctgtacaccatcagtcataatggatggcagtgtaaaagatgatccaaatgaccatgaacaaggcaaaagaggtcataaacccttccttcgtgagctcccacgtgccaccatattcttcctcatcaatctgtaggtaattgctgaagtagaggtacaggactcctgcattgatcaggcagaatcctgctattcccaagaaccctcgtaatggcaaaactccccaaatgacacccaggaccacagcaatgatctgtcggaaccagtagatcacatctaaaaattcatccttatcctcccaggccgcgtcgctccgcagcaccttactccagacggagactttgagggccccgttgg

SEQ ID NO: 685 - DNA, 488 bp, Homo sapiens
ctgcgcaaggaggagcggagctgggagcagaagctggaggagatgcgcaagaaggagaagagcatgccctggaacgtggacacgctcagcaaagacggcttcagcaagagcatggtaaataccaagcccgagaagacggaggaggactcagaggaggtgagggagcagaaacacaagaccttcgtggaaaaatacgagaaacagatcaagcactttggtgagtggggcttgtgggttatggggggcaaggtcgaggcaggccctttgcctccagggccctccagcaccttgccagcatcttcccacaggcatgcttcgccgctgggatgacagccaaaagtacctgtcagacaacgtccacctggtgtgcgaggagacagccaattacctggtcatttggtgcattgacctagaggtggaggagaaatgtgcactcatggagcaggtggcccaccagacaatcgtcatgcaatttatcctggagctgg

SEQ ID NO: 686 - DNA, 491 bp, Homo sapiens
aaaggagcaacttgctgagcttcgtcaggaatttcttcgacaagaagaccagcttcaggactataggaagaacaatacttaccttgtgaagaggttagaatatgaaagttttcagtgtggacagcagatgaaggaattgagagcacagcatgaagaaaatattaaaaagttagcagaccagtttttagaggaacaaaagcaagagacccaaaagattcaatcaaatgatggaaaggaattggatataaacaatcaagtagtacctaaaaatattccaaaagtagctgaggatgttgcagataagaatgaagaaccctcaagcaatcatattccacatgggaaagaacaaatcaaaagaggtggtgatgcagggatgcctggaatagaagagaatgacctagcaaaagttgatgatcttccccctgctttaaggaagcctcctatttcagtttctcaacatgaaagtcatcaagcaatctcccatcttccaa

SEQ ID NO: 687 - DNA, 496 bp, Homo sapiens
aaaaatatattccgtacagttcctgattaacttattttttgatgtattttgaggctagtaacacaatttagaccagaataggttttcatatatcaaaaaaaggaaaggaacacggagagcacagatgagacatatggaggctctatactatagacccatccttgctctgtgctggaatcatcacaggaatcgcacccattcgacttagattaggggcagctaccttagcaggtgggagagtcggactctgaggagtgcgttcaaagtcttcacttggtacttggttatactgagtcwkggaatatccttccatgttggaaggagacatggaccccagggatgaatgattactgccgatgtagcttctggcagtggacgtacggctctttggaggtggcacatcttccctgatatcgtgatgaacttccttttcatatttttcttctctgcgctttttacgacagcaaaagatgataagaccaatgagcgctagagc

SEQ ID NO: 688 - DNA, 522 bp, Homo sapiens
ccaccctatatataattacatattgcatcataaatgctggccttccttctgcaaattatgattttggaaaatccaacccatgcagagggataaaaaactgacatcccttgggtaactttttttttgcaacattccaagccccccccggtcccctatccaaggacaaatgtagggcctctaggatgtcccagacccacctcggagggccagtcagttcaggtaggtcaggcccagttctcttccctcccgacagaccccgggcccgggaagcaccgaagaccatgatgctggctggagtgaagacactcgtttccgtatcaagagctgagcctaagaaatgctcatcgttggtcaggctgggtctgggccaaagggacagacagaaagaaatactgtctccacgggaggaagagggagaggagggaggatggagagcggtgggcatgcaggggacttggcagggcagggtggagaaggtgggaccactgggaggggaccgaggtaagagtggctcttcagagc

SEQ ID NO: 689 - DNA, 549 bp, Homo sapiens
ccaccaaacaattcgagcagctccaggcagccatacatacagaccttggggccttagaaaaatcagtcagtgccctagaaaagtctctgacctcgttgtctgaggtggtcctacagaaccggagaggattagatctgctgttcctaaaagaaggaggattatgtgctgccctaaaagaagaatgctgtttctatgcagaccacactggcgtagtaagggatagcatggctaagctaagagaaaggctaaaccagaggcaaaaattgttcgaatcaggacaagggtggtttgagggactgtttaacaggtccccatggttcacgaccctgatatccaccattatgggccctctgatagtacttttattaatcctactcctcggaccctgcattctcaaccgcttggtccagtttgtaaaagacagaatttcggtggtgcaggccctggttctgacccaacagtatcaccaactcaaatcaatagatccagaagaagtagaatcgcgtgaataaaagattttattcagtttccagaaagaggggggaatga

SEQ ID NO: 690 - DNA, 501 bp, Homo sapiens
ccattgctagttggacgtcggaaggaaaaaaatgttcaaggtataattgaaatcctcaaaggaatgcaagaattgggagtacatcctgatcaggaaacatatacagattatgtgattccatgctttgatagtgtaaactcagcacgagccattttgcaggaaaatggatgtctgtctgatagtgatatgttttctcaagctggattgagaagtgaagtagcaaatgggaacttagactttgtattatcatttttgaaatcaaatacattgcccatctcgctgcagtctataagaagtagcctactgctaggcttcaggaggtctatgaatataaatctttggagcgagataacagaattgttgtacaaggatggacgttattgccaggagcctcgaggaccgacggaagctgttggctattttctttataacttgattgacagcatgagtgactcagaggtacaggccaaggaggagcatttgagacaatacttccatcag

SEQ ID NO: 691 - DNA, 424 bp, Homo sapiens
  misc_feature 395: n = A,T,C or G
gcggccgactcgcaagatggcgccgcagaaagacaggaagcccaagaggtcaacctggaggtttaatttggaccttactcatccagtagaagatggaatttttgattctggaaattttgagcaatttctacgggagaaggttaaagtcaatggcaaaactggaaatctcgggaatgttgttcacattgaacgcttcaagaataaaatcacagttgtttctgagaaacagttctctaaaaggtatttgaaataccttaccaagaaataccttaagaagaacaatcttygtgattggcttcgagtggttgcatctgacaaggagacctacgaacttcgttacttccagattagtcaagatgaagatgaatcagagtcggaggactaggcaaaggctncccttacagggctttgcttattaataaaa

SEQ ID NO: 692 - DNA, 518 bp, Homo sapiens
  misc_feature 482: n = A,T,C or G
ccactgacggaagttgcagaaggtgtttttgaaaccgaggccccgggaggatataagttctatttgcagaatcgcagtctgcctcagtcagatcctgtattaaaagtaactctagcagtgtctgatcttcaaaagtccttgaactactggtgtaatctactgggaatgaaaatttatgaaaaagatgaagaaaagcaaagggctttgctgggctatgctgataaccagtgtaagctggagctacagggcgtcaagggtggggtggaccatgcagcagcttttggaagaattgccttctcttgcccccagaaagagttgccagacttagaagacttgatgaaaagggagaaccagaagattctgactcccctggtgagcctggacaccccagggaaagcaacagtacaggtggtcattctggccgaccctgacggacatgaaatttgctttgtcggggatgaggcatttcgagaactttctangatggatccagagggaagcaaattgttggatgatgc

SEQ ID NO: 693 - DNA, 630 bp, Homo sapiens
  misc_feature 601: n = A,T,C or G
ccaccaaacaattcgagcagctccaggcagccatacatacagaccttggggccttagaaaaatcagtcagtgccctagaaaagtctctgacctcgttgtctgaggtggtcctacagaaccggagaggattagatctgctgttcctaaaagaaggaggattatgtgctgccctaaaagaagaatgctgtttctatgcagaccacactggcgtagtaagggatagcatggctaagctaagagaaaggctaaaccagaggcaaaaattgttcgaatcaggacaagggtggtttgagggactgtttaacaggtccccatggttcacgaccctgatatccaccattatgggccctctgatagtacttttattaatcctactcctcggaccctgcattctcaaccgcttggtccagtttgtaaaagacagaatttcggtggtgcaggccctggttctgacccaacagtatcaccaactcaaatcaatagatccagaagaagtagaatcgcgtgaataaaagattttattcagtttccagaaagaggggggaatgaaagaccccaccataaggcttagcaagctagctgcagtaacgccattttgcanggcatgaaaaagtaccagagctgagttct

SEQ ID NO: 694 - DNA, 589 bp, Homo sapiens
  misc_feature 525, 560: n = A,T,C or G
aaatctgatctctgtcttacaacttccttcagaacacccattagaatatctgtagccagtgtcctctcatgagcctcatcaagaattattacaccataacgctccaggaggggatcattcatagcttcacgaagtaacatcccatcagtcatatacttaagaatggtttttgcactactgcagtcttcaaatcgaatggagtaaccaacttcctggcccaacatcacatccatctcatcagcaactctctgagccacactcattgcagccactctcctgggttgggtacaggcaactcctctcttgggtcctggtaatgatcgcatgtactccacacaccactgtggaatctgtgttgttttaccagacccagtctcaccaaccagtacaaaggactgatgtctaaccagaatatctgtaaacctatccttgtattcccaaacagggagctgaagacgtttctttagaatatcatagtatcgaggagtatggggtaagttggtgaacggattaatgcactgtggnagtgacgtgtgacctgcatgtccggcatgcgttgnatgagcagaatgtgttgaatgcgttgaat

SEQ ID NO: 695 - DNA, 569 bp, Homo sapiens
attttgatattcattttagtgaaaggatgcatcagacctgttccacatcatgcacatgggaaagggtggttatcattttccttctaacaagtaggtacagatattcggttactacacgtgcacctgtagcagtatttctagaaacatccctttttgttgagaacctcccttgaatgtctgtcgcactcacacctgacgggatggttactggattagagagtagatttggcacatcttttcttagtcttttgattcaaattcaaaacttaacagcacaaaccaggtcagagttactttcggttagaatttattgccatttattcctttttataaatttctatagattatactgttatttttatgttattggcctagagctacacgtatatgggtttgtcctgagtccgttttcaaatgaccttgtgatagggaaatggttttgtccatgttcttggaaatacttgtgtatgtacagaaggaagggagggattatttttctacaaagtaatttatgatttctaattttctaatgtgccttggatatgtgccaaatgatggaaaagaaacag

SEQ ID NO: 696 - DNA, 450 bp, Homo sapiens
ccacagaagtaggggggtcttccttaagctctgtgtcagagttccacctgatccttatggatgtgaatgacaaccctcccaggctagccaaggactacacgggcttgttcttctgccatcccctcagtgcacctggaagtctcattttcgaggctactgatgatgatcagcacttatttcggggtccccattttacattttccctcggcagtggaagcttacaaaacgactgggaagtttccaaaatcaatggtactcatgcccgactgtctaccaggcacacagactttgaggagagggcgtatgtcgtcttgatccgcatcaatgatgggggtcggccacccttggaaggcattgtttctttaccagttacattctgcagttgtgtggaaggaagttgtttccggccagcaggtcaccagactgggatacccactgtgggcatggcag

SEQ ID NO: 697 - DNA, 551 bp, Homo sapiens
aaaaaatgaagaattctaggtcaactgaataaaagactaactcaaattaatgaaacacagatctaaaccctcaatcaattcccagacttgagccagttcacaggcccacaacccctaagtgaaggggaggctgggtgatcttggggaagtacgctgctacattgccaaaaacttacatagttaatctttttcccagtcttccccaaagggacctacagccttctaccaggatgactgtgacttagagaaaagaaaattctcagatatttggggaattctggacactggctctgatttgacaggaattcccagagaccaaaaacatcactgtggtccaccagagtagggacttatggaggttagctggtggatggagtgtgagctcatgtctgtttcacggtggatccaatgtgtccctgaacccaccctgtggttggaatagacacatactcagcaactttcagcatccctacatttgttgtttcacttacggactgaggacaagtatgataggaaaacccagttatgagccactaggactggtttcacct

SEQ ID NO: 698 - DNA, 520 bp, Homo sapiens
gagaggattagatctgctgttcctaaaagaaggaggattatgtgctgccctaaaagaagaatgctgtttctatgcagaccacactggcgtagtaagggatagcatggctaagctaagagaaaggctaaaccagaggcaaaaattgttcgaatcaggacaagggtggtttgagggactgtttaacaggtccccatggttcacgaccctgatatccaccattatgggccctctgatagtacttttattaatcctactcctcggaccctgcattctcaaccgcttggtccagtttgtaaaagacagaatttcggtggtgcaggccctggttctgacccaacagtatcaccaactcaaatcaatagatccagaagaagtagaatcgcgtgaataaaagattttattcagtttccagaaagaggggggaatgaaagaccccaccataaggcttagcaagctagctgcagtaacgccattttgcaaggcatgaaaaagtaccagagctgagttctcaaaagtcaca

SEQ ID NO: 699 - DNA, 500 bp, Homo sapiens
aaataaggcttggggtttttcccggtcttttggggaacttgaaactgaggtgggactttccagaaactgttgctagtttcgctttatctgagtaccatctgttcttggccctgagccggggcccaggtgctcgaccacagatatcctgtttggcccctgtcccagttttgttcagccttattctttaactaaacttctttgtgacttttgagaactcagctctggtactttttcatgccttgcaaaatggcgttactgcagctagcttgctaagccttatggtggggtctttcattcccccctctttctggaaactgaataaaatcttttattcacgcgattctacttcttctggatctattgatttgagttggtgatactgttgggtcagaaccagggcctgcaccaccgaaattctgtcttttacaaactggaccaagcggttgagaatgcagggtccgaggagtaggattaataaaagtactatcagagggcccata

SEQ ID NO: 700 - DNA, 523 bp, Homo sapiens
tgctatggctcgatcttggctcactgcaacctccacctcccaggttcaagcaattctcttgccccagcctcccgagtagctgggattacaggtgcatgccaccatggctggctaatttttgtatttttagtagagatggggtttcaccatattggtcaggctgatctggaactcctgacctcaggtgatccacctgcctcagcctcccaaagtgctgggattacaggcgtgagcaatcgtgcccagccttgttcttaattttgtatcatccagtcatcgctaatattacacgcaccttctcacttaatcctcacgacaagcctgtgaggcagatgctcattgttcccatcttgatgaaacttgagtctcagggaagtgaagtgacttgcccagggtcactcaggtagagttgagattcaaacccacatgtggctccaaagtctgcatctggatttgggggtgttttttggcatggcaccctcacctctttccctgcctgttttccccaaagtggaaaggaagg

SEQ ID NO: 701 - DNA, 425 bp, Homo sapiens
gtcgaacacctctctggcccctagacctatctggggacaggctggctcagcctgtctccagggctgctgcggcccagccccgagcctgcctccctcttggcctctcatccattggctctgcagggcaggggtgaggcaggtttctgctcataagtgcttttggaagtcacctacctttttaacacagccgaactagtcccaacgcgtttgcaaatattcccctggtagcctacttccttacccccgaatattggtaagatcgatcaatggcttcaggacatgggttctcttctcctgtgatcattcaagtgctcactgcatgaagactggcttgtctcagtgtttcaacctcaccagggctgtctcttggtccacacctcgctccctgttagtgccgtatgacagcccccatcaaatgaccttgg

SEQ ID NO: 702 - DNA, 503 bp, Homo sapiens
ctgctactcactggccccccagataaaggtcattgctccctggaggatgcctgaattctacaaccggttcaagggccgcaatgacctgatggagtacgcaaagcaacacgggattcccatcccggtcactcccaagaacccgtggagcatggatgagaacctcatgcacatcagctacgaggctggaatcctggagaaccccaagaaccaagcgcctccaggtctctacacgaagacccaggacccagccaaagcccccaacacccctgacattctcgagatcgagttcaaaaaaggggtccctgtgaaggtgaccaacgtcaaggatggcaccacccaccagacctccttggagctcttcatgtacctgaacgaagtcgcgggcaagcatggcgtgggccgtattgacatcgtggagaaccgcttcattggaatgaagtcccgaggtatctacgagaccccagcaggcaccatcctttaccatgctcatttagacatcgagg

SEQ ID NO: 703 - DNA, 599 bp, Homo sapiens
ctgtcactccccagggaagcagaaggtgtgattgtaggccactgggctcctcccatccacacccatggcctcatccgtgagtacattgtagaatacagcaggagtggttccaagatgtgggcctcccagagggctgctagtaactttacagaaatcaagaacttattggtcaacactctatacaccgtcagagtggctgcggtgactagtcgtggaataggaaactggagcgattctaaatccattaccaccataaaaggaaaagtgatcccaccaccagatatccacattgacagctatggtgaaaattatctaagcttcaccctgaccatggagagtgatatcaaggtgaatggctatgtggtgaaccttttctgggcatttgacacccacaagcaagagaggagaactttgaacttccgaggaagcatattgtcacacaaagttggcaatctgacagctcatacatcctatgagatttctgcctgggccaagactgacttgggggatagccctctggcatttgagcatgttatgaccagaggggttcgcccacctgcacctagcctcaaggccaaagccatcaaccagactgcagt

SEQ ID NO: 704 - DNA, 445 bp, Homo sapiens
aaaaaactggtattttgtaaatgtgtcagagacacatgggacagaaccctactttttgtagaggaacttaatctgaataaagtctgagtttttcagtaaatctccactgagttttctggtaattttacaaaaacaagcccatcactgtccattggaaatgggttagacagatagatattctttcagtttatctatgatttcgttcatcttgtcgcctggaattaacatcacagttcgcaagggcgtcattggtacgtcatcaaaagaccatttgcctcccagacaagtgtcgctctcctcctgcactgagtagttgaacttgagaattgccttctcatagaaaaattcttcctctgcatttgcaaacattaacgcagctttctttttgttgctaggtttctttttggaattgttttttcctgcttccacaaatgtcttactaatc

SEQ ID NO: 705 - DNA, 402 bp, Homo sapiens
ccaaaatcagtctctacaagaagagacagtccaatacagtcaataagaaaactagttgtgaacaacaggtaaaaaaagaggtttccagttaatgtgaaagaaggaatagtacctttcataaaacaagcccttcagcgctgagttaactgatcggtactattgtgctgcacgtaatgtaacacatcacctccaagacttggtcctgattggtcataggaagtaagggactttctggtagttacatcagatatttgagaagattaaaagttttccggacatgatggtatactaatagtgcaaccttgcaaaaagggttcgaaacattgtcagacttggaagagttccccagcttgataaacaacctcaaagacaccccgagcctttgaacggagccctctgcac

SEQ ID NO: 706 - DNA, 377 bp, Homo sapiens
cctgacattcctgccttcttatattaataagaaaaataaaacaaaatagtgttgaagtgttggggcggcaaaaatttttgggggtggtatggagagagaatgggcgatgtttctcagggctgcttcaagcgggattaggggcggcgtgggaacctagagtgggagagattaagctgaatggaagatcttgtggtaaggggtgatattgtggggttgttagaagaaacatttgtcgtatagaatgattggtgatggcctggatacggttttgtatgaattgaaaaatggaataagagaaggagagaaacaggtataaaaggtctaagaattgggaggacctaggacatctgattagagtgcctaaggagattcggcat

SEQ ID NO: 707 - DNA, 501 bp, Homo sapiens
ccaagtggctgtggtgctgggccacccgtcccactccattgagcgccaaatggggtagctggaaagccatactgctgtggggggcacatagacttggtgaagtgacctagagaggtagctgatgctgcagagatgggggcagagccacccaggttcgaggtcatggagatgcacagttgcccaggtgcagagaacttccttgccattccagggccctcataattcatgtgccctttgcttcctctcccgcctgagagattcatggcatctcgggcccaattgtctaccaacttgtgcaagtcatctgtgaatgtgcccttcctgctggacgtcatggcaggaggctgagcttgggcggcttggctgttcactgttgccccaacagtgtttgtgctgctggttccttgacctggagcagaaaggcttggtactgaaatggcaccatcactggtgaaggctgaatagaggttgtcactggagggagatggcttaaggggctgt

SEQ ID NO: 708 - DNA, 484 bp, Homo sapiens
ttgttttgcttcttccttaaagcatttgcaacagctacagtctaaaattgcttctttaccaaggatatttacagaaaagactctgaccagagatcgagaccatcctagccaacatcgtgaaaccccatctctactaaaaatacaaaaatgagctgggcttggtggcgcgcacctgtagtcccagttactcgggaggctgaggcaggaaaatcgcttgaacccgggaggtggagattgcagtgagcccagatcgcaccactgcactccagtctggcaacagagcaagactccatctcawaaagaaaagaaaagaagactctgacctgtactcttgaatacaagtttctgataccactgcactgtctgagaatttccaaaactttaatgaactaactgacagcttcatgaaactktccaccaagatcaagcagagaaaataattaatttcatgggactaaatgaactaatgaggataatattttca

SEQ ID NO: 709 - DNA, 365 bp, Homo sapiens
ctgcgagtggacgccctggaaaggacgctggagcagaagaataaagaaatagaagaactcaccaagatttgtgacgaactgattgccaaaatggggaaaagctaactctgaaccgaatgttttggacttaactgttgcgtgcaatatgaccgtcggcacactgctgttcctccagttccatggacaggttctgttttcactttttcgtatgcactactgtatttcctttctaaataaaattgatttgattgtatgcagtactaaggagactatcagaatttcttgctattggtttgcattttcctagtataattcatagcaagttgacctcagagttcctgtatcagggagattgtctgattctc

SEQ ID NO: 710 - DNA, 505 bp, Homo sapiens
cctatgatttatttgaaggtagcttttgtgtctggtgtgaggtaagggttgaggttctttgtgtgcgtatgaatctccaattgttctaggaccatcatggaatgttattcagccttcaaaaggaaaaaaattgccaggcgtggtggctcacgcccataatcccagcactttgggaggctgaggcaggaggattgcttaagctaaggagttcaagaccagcctgggcaacataatgagaccttgtctccactaaaaattcaaaaaaaattagccgggtgtggttgcacatgcctgtagtcccagctacttgtgaggctgaggcaggaggattgtttgaacctggaaagtcaaggctgcagtgagccctgattgtgccactgtactccaacctgggcaacagcgtgagaccctgtctcctcaaaatcccagcaatagcttccctttctttgcataggtgaggatgaacagtwktaatccaaaaggtttcccaaaaaagttatttttt

SEQ ID NO: 711 - DNA, 363 bp, Homo sapiens
aaaccattaccagaaaagtaaatgaagagtctacttaaggcacttcatatgaaagctaattcaaaattttcacaaaagtcacactattttataagtgtagtaaattaccttctacacattttagccagaatgctgcctttctccttacagaagaatgtgctcttaaagggagaaaaagcaaatacaaaaaattgtcattctgtcaatgttcatgacaaattatctggaactatacagattacatggcagtagtattcccgtggtcaatctgtacaaatcagggcatcttcatacaagtctcataagaaccacagcatagatttggcctgagacaagtacaagaatagcaggtaaggaattcag

SEQ ID NO: 712 - DNA, 390 bp, Homo sapiens
aaatcctgcaactttattatctagtagaattccaagtaggtctgcttagacacatattcagtgaagattgtactgtgtgtgatattatcctatctttaataaagtcctactactgaaaaacagggatttgcaatgaaaatcatagctaaataggcaggtttagaaagttcaaaatattggaagtgctagaaggctgcaacttgtaaaattgtactccccaagttcagtaggatagtagagaagtcgtgctaagttgatttcattgaaatgtcacgtctcacatcctgtggtccaaaggtactagtttgttttgtggaataattttctgttcacttgctgataagaaatttagcagtcagaagtaatttttaattaataacctttcttttt

SEQ ID NO: 713 - DNA, 446 bp, Homo sapiens
ccgggcaggtccggacatcatcgcaagggccgcagagcatctgcggtatgtctttggttttgagctgaaacagtttgaccgcaagcaccacacttacatcctgatcaacaaactaaaacctctggaggaggaggaggaggaggaggatctgggaggagatggccccagattgggtctgttaatgatgatcctgggccttatctatatgagaggtaatagcgccagggaggcccaggtctgggagatgctgcgtcggttgggggtgcaaccctcaaagtatcatttcctctttggttatccgaagaggcttattatggaagattttgtgcagcagcgatatctcagttacaggcgggtgcctcacaccaatccaccagcatatgaattctcttggggtccccgaagcaacctggaaatcagcaagatggaagtcctggggttcgtgg

SEQ ID NO: 714 - DNA, 534 bp, Homo sapiens; identical to SEQ ID NO: 675

SEQ ID NO: 715 - DNA, 426 bp, Homo sapiens
ctgaaccctcgtggagccattcatacaggtccctaattaaggaacaagtgattatgctacctttgcacggttagggtaccgcggccgttaaacatgtgtcactgggcaggcggtgcctctaatactggtgatgctagaggtgatgtttttggtaaacaggcggggtaagatttgccgagttccttttactttttttaacctttccttatgagcatgcctgtgttgggttgacagtgagggtaataatgacttgttggttgattgtagatattgggctgttaattgtcagttcagtgttttaatctgacgcaggcttatgcggaggagaatgttttcatgttacttatactaacattagttcttctatagggtgatagattggtccaattgggtgtgaggagttcagttatatgtttgggatttttt

SEQ ID NO: 716 - DNA, 557 bp, Homo sapiens
  misc_feature 487: n = A,T,C or G
ctgaaccgcctcaaggttgaagaattagccctccaaccaatgatcagttctagaagaggggatgagatgctgtcttctcacactgtacctgaacagtcacatgatatgttggtgcatgtagacaatgaagcatcaatcaaccaaacaaccctggagctgagcacaaagagtcatgtgacggaagaggaggaggaggaagaggaagaagaatcagattcctaaaggagggggaaagccaggctggtcagttatacaaattgcatttctaaggctcaggctacttctcctcaaggaaatcatcttgccctgggccctgtgatctgcttgaaaggaaagcaagaactataaggaggatgtgtagttgcaaaaatggctccatcggtaactcaagcttcagaatgttatgacatacagaaaatcaaagatgctgtgtcttagcattgagtaatatgggtggtgctgtctgtaatctggtcagattcagttnactgtccagaacaaaatttcctctgaaatactgttgagaaagtctgtcatttgcaaaaagagcagagttt

SEQ ID NO: 717 - DNA, 454 bp, Homo sapiens
aaagaacagctctttgaaattgaaattgaccctttttgcttgaccttaaggagattagcttccagtagatgagtttgcaaaatacttttcctgttcttttgttttgctggtattgaaaacatcccactaaatcagatgaagaggcatgggaggaaaaatatccaaattaattactaaaatcgagaagagaaggcaaactcttgaaaagtaaaaaggtgtttgtgaccttcagtatttattgaacagaggaaataactgacaagggcaatacaattcaatgttcatgtagtaacattcatgtcacttgttgaatttggttctcatatgtatattgcatacacataaattcaaactataagtcgtcatttttgagccatcatcttacattcatgtaatgaaattatggaagagagtaaaaactagctcttaacttagtaaatataatatggtattt

SEQ ID NO: 718 - DNA, 294 bp, Homo sapiens
aaacattacccagcatcattgtttataatcagaaactctggtccttctgtctggtggcacttagagtcttttgtgccataatgcagcagtatggagggaggattttatggagaaatggggatagtcttcatgaccacaaataaataaaggaaaactaagctgcaccgtgggttttgaaaaggttattatacttcttaacaattctttttttcagggacttttctagctgtatgactgttacttgaccttctttgaaaagcattcccaaaatgctctattttagatagtttaaca

SEQ ID NO: 719 - DNA, 450 bp, Homo sapiens
ctgcatttgtttatacagaacacatttactcaggaccctgcagtgtcagcttcgttctttgggtatgcagccttctatctggatctctgcaggccagccagaatatctgttgttcttagcatcagagtggttgatcttttctctctgaatttcggaagggagttccaagccttttgctgcaataaatacccagctagacctgaatttcatgttcctgatttctttacttccaagtgcttctatggcattcttggcatcgttattcagtcttgtgcttccgtcgtcataggtcaccatgaagagcagggattttggagcagcactctgaataaactttgtcatcggtccagagttatcgccttcatacatatcaaaacatcgtgttgctgtcacattcccagttacatagttgacaatggcaatgtttattcctctggcaacatttcccag

SEQ ID NO: 720 - DNA, 478 bp, Homo sapiens
ctggggccactgtcggcatcatgattggagtgctggttggggttgctctgatatagcagccctggtgtagtttcttcatttcaggaagactgacagttgttttgcttcttccttaaagcatttgcaacagctacagtctaaaattgcttctttaccaaggatatttacagaaaagactctgaccagagatcgagaccatcctagccaacatcgtgaaaccccatctctactaaaaatacaaaaatgagctgggcttggtggcgcgcacctgtagtcccagttactcgggaggctgaggcaggagaatcgcttgaacccgggaggtggagattgcagtgagcccagatcgcaccactgcactccagtctggcaacagagcaagactccatctcaaaaagaaaagaaaagaagactctgacctgtactcttgaatacaagtttctgataccactgcactgtctgagaatttccaaaactt

SEQ ID NO: 721 - DNA, 550 bp, Homo sapiens
  misc_feature 448: n = A,T,C or G
ctggcctttttacccgcgtcagtgaattctaagactagggggttgcatcgaccccccggtgtggcaccctggacgccactggagaccgaggaatcataacaggggccctgatccttaggagtgtttcctcgcttaagggaaattaggtcccatgatgatgatggcttccagtatgcctgtccagtggtctcacatcctcatttgccacagtagccctctcccggccctccacaccctattggtacagtatgaccggggcaaacatagaagtcatacagtcttgtcctttttcttccccccggagagcggcaaccatctccaatatcgggttctgggtcatcccaatggtctccaactaaattacacaagtcaaaatatagtttagggaaggtgtctgtcatcgtccccaggagggaggtagcgttagctgtttgtcctgtcattaggnkbgtaactctccaagtgacattgaagacctggtgagggctgtcacgttgtaccgaggctcctgccctcaccaagatccctataactattagggggccccacg

SEQ ID NO: 722 - DNA, 545 bp, Homo sapiens
aaatatgacagactactaaaattcaaatgcatgtatctgcaagctgggcagggagtaaaatcatgaatgagacaggacggtcagcccaaaaccatgcaattaggttgtgggtttattattttcaaaagtgaaatttctatgttccatttgaaactatgttgcatattcatttagcattcacattaaacccacatttgactctaacgctgattcaaggaagaaagttcaacattcactcaatgactaagtccacaactcaactctcaatgttaaggcagcacagctacagtgatagcaacgctaaccaaaaggtaatgaacatttagtcacttgccagcccttttgttacaacagtgtagtaatttccctaagacaatttgctaccggataattttctgctgttaaaaggcttcctctgtggaaaaacaccacaaatttccagtgtgaaagtaagtccatggtggtataaatatatatatgcataattacacaatttacactgcacacatcgtttacaggggacaattaactgagagggttaattt

SEQ ID NO: 723 - DNA, 568 bp, Homo sapiens
ctgactggttcctttaccaaggtttgcagagtaggttgtgtttgaacaccttctgtgggtctgtgtcatttccaagttgaagaatttcagccaaagagcaacatgtcacattgattaaagatggttaatgacacagaaacatttctgttaatactaagggaaaaggctgttcttttatttatttatttttcctgagtcctcactttttcttctctgacaaatgtttgaaattcagtgaaataccaaaggagtcaaggatgaaggggacacaggatggaatcagaaaaaacataaatggaatccaggcagttctatgagacaacactgatatatctccttgataaagaaaaaatgtacagaatatttaatgagtctgtcttgccccaaaagggaaaaacacaagtagctaagccatttgcagagaggaaaaatgtcatggaaaaatgaaaaatctctctaatgtctatagcacatgaaatatctaagtaggtgggtgcagtggttcatgcctgtattgggagaccaaggcaggcagatcacttgacgtcaggagttcagaccagcctgg

SEQ ID NO: 724 - DNA, 454 bp, Homo sapiens
ctggcttcactgctcaggtgattatcctgaaccatccaggccaaataagcgccggctatgcccctgtattggattgccacacggctcacattgcatgcaagtttgctgagctgaaggaaaagattgatcgccgttctggtaaaaagctggaagatggccctaaattcttgaagtctggtgatgctgccattgttgatatggttcctggcaagcccatgtgtgttgagagcttctcagactatccacctttgggtcgctttgctgttcgtgatatgagacagacagttgcggtgggtgtcatcaaagcagtggacaagaaggctgctggagctggcaaggtcaccaagtctgcccagaaagctcagaaggctaaatgaatattatccctaatacctgccaccccactcttaatcagtggtggaagaacggtctcagaactgtttgtttcaattgg

SEQ ID NO: 725 - DNA, 500 bp, Homo sapiens
cctgggcttgaaatttgctgagctggtgtataccggtttctggcacagccctgagtgtgaatttgtccgccactgcatcgccaagtcccaggagcgagtggaagggaaagtgcaggtgtccgtcctcaagggccaggtgtacatcctcggccgggagtccccactgtctctctacaatgaggagctggtgagcatgaacgtgcagggtgattatgagccaactgatgccaccgggttcatcaacatcaattccctcaggctgaaggaatatcatcgtctccagagcaaggtcactgccaaatagacccgtgtacaatgaggagctggggcctcctcaatttgcagatcccccaagtacaggcgctaattgttgtgataatttgtaattgtgacttgttctccccggctggcagcgtagtggggctgccaggccccagctttgttccctggtccccctgaagcctgcaaacgttgtcatcgaagggaagggtggggggcag

SEQ ID NO: 726 - DNA, 569 bp, Homo sapiens
  misc_feature 551: n = A,T,C or G
aaataaggcttggggtttttcccggtcttttggggaacttgaaactgaggtgggactttccagaaactgttgctagtttcgctttatctgagtaccatctgttcttggccctgagccggggcccaggtgctcgaccacagatatcctgtttggcccctgtcccagttttgttcagccttattctttaactaaacttccttgtgacttttgagaactcagctctggtactttttcatgccttgcaaaatggcgttactgcagctagcttgctaagccttatggtggggtctttcattcccccctctttctggaaactgaataaaatcttttattcacgcgattctacttcttctggatctattgatttgagttggtgatactgttgggtcagaaccagggcctgcaccaccgaaattctgtcttttacaaactggaccaagcggttgagaatgcagggtccgaggagtaggattaataaaagtactatcagagggcccataatggtggatatcagggtcgtgaaccatggggacctgttaaacagtccctcnaaccacccttgtcctgat

SEQ ID NO: 727 - DNA, 489 bp, Homo sapiens
ctgatcctcactattgtgggcaccatcgctggcattgtcattctcagcatgataattgcattgattgtcacagcaagatcaaataacaaaacgaagcatattgaagaagagaacttgattgacgaagactttcaaaatctaaaactgcggtcgacaggcttcaccaatcttggagcagaagggagcgtctttcctaaggtcaggataacggcctccagagacagccagatacaaaatccctattcaagccacagcagcatgccccgccctgactattagaatcataagaatgtggaacccgccatggcccccaaccaatgtacaagctattatttagagtgtttagaaagactgatggagaagtgagcaccagtaaagatctggcctccggggtttttcttccatctgacatctgccagcctctctgaatggaagttgtgaatgtttgcaacgaatccagctcacttgctaaataagaatctatgacat

SEQ ID NO: 728 - DNA, 524 bp, Homo sapiens
  misc_feature 450: n = A,T,C or G
ctctgtttagcttagttgcacaaaaggtagtatgtccagtggctagaggtggggtgggaagagaggaggccaggccaggccctcaggaattccctggtttccactgggccacccacttgctggacagtctgagccaagtccctcctgctggagaaaagcctggaactgccaaaacaaaaaaacaaatacaaacaaacctcgtcaccacggtcaggaggaggttcagacattctgcccagaggggctggggaaagggatgggagccaggaaagatttaggggcaggagacagacacgtaacaggaactcggaaggtagaacttagaattcagaacttgggtttcaattgtagaatttggaatctggaatacagaattgggaagaagaacagagatgacaaaagaccacttgaagagaggttcctaatactagacagatggagagtggcttngctgtttccccctgcatattggggttgaaaacttaaatgtgtagttccagtccttctatgcagagtctctcctg

SEQ ID NO: 729 - DNA, 535 bp, Homo sapiens
ctgcaagcgttaatttagttagagtcttcttgatggttttatttattttttttacctgacctgaactctggggtctataagcacaatgtaatttctaatcgatccccagtaaatcggccaccgactgacttacctgggagacgaaggcaggcccattatcggaacccaatacctgtggcatcccgaatcttgggaatatttcttttaatagcttcttggtcacaaccttggcagtttcacgtttagttgggaaggctttcacccagctagagaaggtgtctacgaacaccaggaggtacttgtacccgtacagccctggtttaacttcagtgaagttaattttccaatgggtacctggtcgatgtccgcgtactcgtacccctgccccgattttggctttactagcatttacttgagcacagactgtgcaggattctgccacatactgaagagttctgtccctgtttaacatgtagtaggggcttttttctctgtcaaggagcgcctttattttttgagggctgagatgggtgag

SEQ ID NO: 730 - DNA, 504 bp, Homo sapiens
aaataaggcttggggtttttcccggtcttttggggaacttgaaactgaggtgggactttccagaaactgttgctagtttcgctttatctgagtaccatctgttcttggccctgagccggggcccaggtgctcgaccacagatatcctgtttggcccctgtcccagttttgttcagccttattctttaactaaacttccttgtgacttttgagaactcagctctggtactttttcatgccttgcaaaatggcgttactgcagctagcttgctaagccttatggtggggtctttcattcccccctctttctggaaaccgaataaaatcttttattcacgcgattctacttcttctggatctattgatttgagttggtgatactgttgggtcagaaccagggcctgcaccaccgaaattctgtcttttacaaactggaccaagcggttgagaatgcagggtccgaggagtaggattaataaaagtactatcagagggcccataatgg

SEQ ID NO: 731 - DNA, 521 bp, Homo sapiens
ccaacatgattttctaatagaccaaaggtgagaagagtaaaagtcaaggatggctagccaaaatctttggcccaagagacacaaaaattgtttcattaactgaaaaaggcaacagtacacaagagactggtttgaggcatgaacatcaggagcacagttttgcacttttaagttgacatattggatattcaacagagttgtcatgcaggtaaactgaattggtatgacattcgaaagaaaagtataggctgtcgatcttaagtgtcgaaatcagcttataggtggtatattacatcatgaatgaatctgaatgaaattggacccagagtgtggacagaaaagagaagtggaaggactgaaccatggggcactccaacagaaagaagtttaacatgtaacagaaacatgtaacaaaaacctggaagcaaagtaaaaaaaaataaaaacgtttcaaggaagagatctggttaaatggaaccaacaggtcaagtgagatgaggattgaaaaaggacccctgggc

SEQ ID NO: 732 - DNA, 525 bp, Homo sapiens
aaataaggcttggggtttttcccggtcttttggggaacttgaaactgaggtgggactttccagaaactgctgctagtttcgctttatctgagtaccatctgttcttggccctgagccggggcccaggtgctcgaccacagatatcctgtttggcccctgtcccagttttgttcagccttattctttaactaaacttctttgtgacttttgagaactcagctctggtactttttcatgccttgcaaaatggcgttactgcagctagcttgctaagccttatggtggggtctttcattcccccctctttctggaaactgaataaaatcttttattcacgcgattctacttcttctggatctattgatttgagttggtgatactgttgggtcagaaccagggcctgcaccaccgaaattctgtcttttacaaactggaccaagcggttgagaatgcagggtccgaggagtaggattaataaaagtactatcagagggcccataatggtggatatcagggtcgtgaacc

SEQ ID NO: 733 - DNA, 439 bp, Homo sapiens
aaaagaactcagtcctcggttggggaagagtttgcaagaagttctagatgatgctgctgatgacattggagatgcgctctgcatacgcttttctatacactgggaccaaaatgatgttgacttaattccaaatgggatctccatacctgtggaccaaaccaacaagagagactatgtttctaagtatattgattacattttcaacgtctctgtaaaagcagtttatgaggaatttcagagaggattttatagagtctgtgagaaggagatacttagacatttctaccctgaagaactaatgacagcaatcattggaaatactgattatgactggaaacagtttgaacagaattcaaagtatgagcaaggataccaaaaatcacatcctactatacagttgttttggaaggctttccacaaactaaccttggatgaaaag

SEQ ID NO: 734 - DNA, 303 bp, Homo sapiens
aaaacctcctttcatctttgaaaatagaggagagaacatccctgggccagtcacagttactgtatttggctaagcacacacctgtatgagggacccgcccctccacactgttctgataggtacttagcaccctagaaactcatcctctgcaggagagagaagcaagggtctggagcgcggtcacatactctaaggtatcttccaggacagggggctgggctccctcactcccacctggagtcgctatggctattgggatcaaactaccagttacatactggttacttggatgtcagacccggt

SEQ ID NO: 735 - DNA, 516 bp, Homo sapiens
aaatatttaggttattaagaagtctaaaatgttacacagttagaggtagataacagtcccaagtttccatggaatctaataatttagtatctggacatcaaacagatcacaaactccttcgttatcatctaaattaaagttgtagtcatctgcctgggtaggagaaagccttaagagaggaaacacgtcagaagacattaactcatcaatgatatctccactaatagatcctgctgaagatatatctgtagctgatgtctgctacagagcctggcttctttcagagacatgttgctcaggcagattttgagttgccatgctggatttctgtggagtcactggagtcaaggactgggaggaaggctgtgtgaggtcatcaggtgggggaacaggaaaaaccacgggcttagatgaactcgactctttatttataagcagcacatggataggtcctgaatgactctttagattgatctggtatttcttttgtccattctgacccatttctggaatggg

SEQ ID NO: 736 - DNA, 610 bp, Homo sapiens
ctgagatttttcaggtaattttgttgttactcacttaagactggaattagaatgtttctggtatttctcatttttttccctggctatgatagaatctcatctaatcttgacatctctcctaggggaagaatatcacaggctaatagcgtggttgggggtgaagatgatagcagttattaaatcaggaatctcttttatgtatgtccttgttacattgaggttaagagacaaaatcattggcagtgcaatctctttccaggatttcgtttgctgtggcattggttatatcagagcactttaatctgaaggatgatactgtaacttgatttatctaattagcttttaattatctacagctattttattttatttaattctctcctacagtactgggaccactgtaaacttctcagatgacttgtatttttgtagtgctatgaaatttatttacatacttataaagaaaactgtatgttcacttgaactctgaaaatgtacatgtatggctggacgcggtggctcacgcctgtaatcccagcactttgggaggctgaggcgggtgaatcacttgattgaggtcaggagttcgagaccagcctggacctcggcc

SEQ ID NO: 737 - DNA, 601 bp, Homo sapiens
ccaaggaaaaggagtttggaggggaaaaaaagaaaaaagcaaactgaaaatccaaatgaccagggataaggctactacaggtaagagaacccatcaaaagctagggtaggtaactgcatctctgcctccaggactgtgtggttaatgacagtcatttcaatgccttctactggttgcactaatcccttgatttctcatatgtacaaaagtataaaacagtaaagtgcagtgtttcagttacacttttccttgctttaatatttgttgtctttttctgcttttgaaatgagctctcaattacaaaataccaaactacactcaaaagagggtgtagaaaaagccagccattggcacagcatggagaagcccacaagtaaggacagatagcagcagcaggtggcaagaggtgggaggtgactgaagcagtggttacaaatgttcacaggaagctaaaactatccaacaggttgtgccctaatgttagcacaggttagactagttactaccttgctaggtggcctcagtgtgttcagattctacgcagcaatacaatttcttccagttaagagttcttgacttgcaccgatcacagcatggttga

SEQ ID NO: 738 - DNA, 121 bp, Homo sapiens
aaaaacatttttgtagactctaaagggaattacaaaaaaaaaaaagtctgaaagcaaatcctgacagcaacccctaggtttaaggacaggttctaaactagacccaaacggaaatcctgac

SEQ ID NO: 739 - DNA, 543 bp, Homo sapiens
  misc_feature 514: n = A,T,C or G
ccacagaagttgctgctgacgctctgggtgaagaatggaagggttatgtggtccgaatcagtggtgggaacgacaaacaaggtttccccatgaagcagggtgtcttgacccatggccgtgtccgcctgctactgagtaaggggcattcctgttacagaccaaggagaactggagaaagaaagagaaaatcagttcgtggttgcattgtggatgcaaatctgagcgttctcaacttggttattgtaaaaaaaggagagaaggatattcctggactgactgatactacagtgcctcgccgcctgggccccaaaagagctagcagaatccgcaaacttttcaatctctctaaagaagatgatgtccgccagtatgttgtaagaaagcccttaaataaagaaggtaagaaacctaggaccaaagcacccaagattcagcgtcttgttactccacgtgtcctgcagcacaaacggcggcgtattgctctgaagaagcagcgtaccaagaaaaataaagnagaggctgcagaatatgctaaacttttgg

SEQ ID NO: 740 - DNA, 500 bp, Homo sapiens; identical to SEQ ID NO: 245

SEQ ID NO: 741 - DNA, 408 bp, Homo sapiens
gcttttttttttttttttttttttttttttttggkatttacaagttggcttgtccaratatactataacttartgtctgtatttaatattgacaaccaaaaatatatataaatatcttgcatytatacacaacagggcaggagtctccatgtcttcttgagcagtgagtttgcaggctcccacaggccctyttctcatggtaatagtgkggccctcagtgcaaaggaractaraacccggcagcccaractggcccttcccctytcctccctgcactccagtgctcccaactggtctcaggtaaaraaarattaatttgagtggttgggtaggaaraaatgggaaggggcaaatcctaatggagcctgacccctaragkggggaratccaggccagcaragcgggtgg

SEQ ID NO: 742 - DNA, 272 bp, Homo sapiens
ccatgcagcggccaggtccttatgacagacctggggctggtagagggtataacagcattggcagaggagctggctttgagaggatgaggcgtggtgcttatggtggaggctatggaggctatgatgattacaatggctataatgatggctatggatttgggtcagatagatttggaagagacctcaattactgtttttcaggaatgtctgatcacagatacggggatggtggctctactttccagagcacaacaggacactgtgtacacatg

SEQ ID NO: 743 - DNA, 363 bp, Homo sapiens
aaagttgaactaagattctatcttggacaaccagctatcaccaggctcggtaggtttgttgcctctacctataaatcttcccactattttgctacatagacgggtgtgctcttttagctgttcttaggtagctcgtctggtttcgggggtcttagctttggttctccttgcaaagttatttctagttaattcattatgcagaaggtataggggttagtccttgctatattatgcttggttataatttttcatctttcccttgcggtactatatctattgcgccaggtttcaatttctatcgcctatactttatttgggtaaatggtttggctaaggttgtctggtagtaaggtggagtgggtt

SEQ ID NO: 744 - DNA, 630 bp, Homo sapiens
agacgttcagcctcatgacttaggaaaagttggagaggtcattgtgaccaaagacgatgccatgctcttaaaaggaaaaggtgacaaggctcaaattgaaaaacgtattcaagaaatcattgagcagttagatgtcacaactagtgaatatgaaaaggaaaaactgaatgaacggcttgcaaaactttcagatggagtggctgtgctgaaggttggtgggacaagtgatgttgaagtgaatgaaaagaaagacagagttacagatgcccttaatgctacaagagctgctgttgaagaaggcattgttttgggagggggttgtgccctccttcgatgcattccagccttggactcattgactccagctaatgaagatcaaaaaattggtatagaaattattaaaagaacactcaaaattccagcaatgaccattgctaagaatgcaggtgttgaaggatctttgatagttgagaaaattatgcaaagttcctcaraagttggttatgatgctatggctggagattttgtgaatatggtggaaaaaggaatcattgacccaacaaaggttgtgagaactgctttattggatgctgctggtgtggcctctctgttaactacagcagaagttgt

SEQ ID NO: 745 - DNA, 124 bp, Homo sapiens
aaacatatcttcagatctgtgacagtgacagccaataggactgataatattagcttcaaaccaataatatccagggttaaaataaaaatcatagtgaaagtacgattgtaaaattatgctatat

SEQ ID NO: 746 - DNA, 445 bp, Homo sapiens
attttggacccatgaagggaggaaattttggaggcagaagctctggcccctatggcggtggaggccaatactttgcaaaaccacgaaaccaagcagtggcagaagattttaattaggaaacaaagcttagcaggagaggagagccagagaagtgacagggaagttacaggttacaacagatttgtgaactcagccaagcacagtggtggcagggcctagctgctacaaagaagacatgttttagacaaatactcatgtgtatgggcaaaaaactcgaggactgtatttgtgactaattgtataacaggttattttagtttctgttctgtggaaagtgtaaagcattccaacaaagggttttaatgtagatttttttttgcaccccatgctgttgattgctaaatgtaacagtctgatcgtgacgctgaataaatgtctttttttt

SEQ ID NO: 747 - DNA, 472 bp, Homo sapiens
ctgaagatagatcgccatcatgaacgacaccgtaactatccgcactagaaagttcatgaccaaccgactacttcagaggaaacaaatggtcattgatgtccttcaccccgggaaggcgacagtgcctaagacagaaattcgggaaaaactagccaaaatgtacaagaccacaccggatgtcatctttgtatttggattcagaactcattttggtggtggcaagacaactggctttggcatgatttatgattccctggattatgcaaagaaaaatgaacccaaacatagacttgcaagacatggcctgtatgagaagaaaaagacctcaagaaagcaacgaaaggaacgcaagaacagaatgaagaaagtcagggggactgcaaaggccaatgttggtgctggcaaaaagaagtgagctggagattggatcacagccgaaggagtaaaggtgctgcaatgatgttagctgtgg

SEQ ID NO: 748 - DNA, 342 bp, Homo sapiens
aaaataatcccagaacaccaaaaataaaaacaaacaataacatgtttatctttacccttagcaggaagatgcttggctggaactttgtgttcacagacttagtcattgcataccaaaaccatatttactggaaaatatcccaggtttctaaatgttataaaagcacaatagagttatggaaatgtttccatgatgaactgtgctgttaggattcttatttgctactcataaaaaccagagtttgtaataaaatggaagcatggtattcttttctttatgtaattgatggttattgaaaggtacttgtgaagaaaattattttaattggtatggagagcttgt

SEQ ID NO: 749 - DNA, 600 bp, Homo sapiens
  misc_feature 568: n = A,T,C or G
aaaacaaaccaaacacatgtaaattgcaaaatacaaaaaggtaaatttataagtaaaaatgaccaaacccacaaaactggagtatttcgaaggttgagggttcagtggagggtgtaacacgaaaggaacttcacaactgaaagaaatcattgccgagtttcctccaggcagcactgaaatgaatggagaaccttctctcgaacatctcacacgttaaaaaaaataaatatttaagagatacaaggctcagattggttttcatatacattgcacttgaagtttaagacccaatacttgcaaattaggtctggtatggtctatgccattaaatgaatacattgtgctcaccaatatcattgactagaaacaccacacgtttaatgcagtgccatatgcactctcctttttacaaggcaatcacagattgcaaattccatagggctgtggcaaaaaacagtcatctctattctgtagtaacaaacaaacaattttggctcactaagattgaaatacatggcagacaggtattcattcttagatgactatggatttcgaaataaacttcatnaactgaggtgaaaattccaatatattgcagtg

SEQ ID NO: 750 - DNA, 291 bp, Homo sapiens
ccttgtgcagaaaggttttctcattgcatccatactgtgagaataaactgcagactgaaagaaacatgcctgcagggtcaggaactgggccactgttcccagaacgggttgtgcctcagaaatctatttctcttttagatgttgaaccctgagagaactaagatgatatttcagaagagttggctgccttctctggaaacaaggaaaacccaataattccgaggaacattgggggttaaataccaagaataaaaattggttcttctttgacttcagcttaactgtattaag

SEQ ID NO: 751 - DNA, 508 bp, Homo sapiens
gggagataattatttctttccttatattttccaattagttggtgtctaaaaataaatgttttgtctaattttagatcaggtatacattcacaaaagcataaatcatagtctcacaggaaattcaccaattttccatatgtcgtgagataactgtcctttctacaacctcataacaatgaatttatataattacctagattttcttagtgtgaatctacccattagttttattttcttggtagttattttttccctcctctctgttactattggccttaaaatacacagaggacggttacagtgtcctaatagctgttacatgtgtgtgtttcagcgtacttgaatcaagtgtacatttatagtaccaataaccgcctttacagctttacagttaacaattctctcacaaaactgtagagcattaggcatctgagagccatagagggccaactttgttccagagtgaacatgctttttttcctcaacatatacactactgatttttttt

SEQ ID NO: 752 - DNA, 536 bp, Homo sapiens
aaaaaaaaaaaaagcaaagctttctgccagactgagggtgccttttggggggtgggagaaatgaactgacagataaacagtaactcagcgtaagtgacctgtggatcatcagtagtacccaagcatggtcctgaacagtgtattagcagagctttagtttatctcagtcctggatgggagagagagggaggagtaaaactgggcaagacaaagagccctggatcgttgaattgatagtttaatttctgctgttggctgttaataatttggattatttatgtttataaatgatacagatctgtttacaaggtttgtagatactttttttgttcctgttcatagatgggaagcttccttataactgatgcagagaaaaattagtccttcaaatactgctgtattttcaggaaaaaaaaaggggtgtttctattgaaactgtactaaatttttgcctacaatttaccttgttaaatattgtagataaattgctaatactaatagccaaatagataacactaatgctttgtttacctgcc

SEQ ID NO: 753 - DNA, 519 bp, Homo sapiens
aaaacgatactgcatagaacgtgtgttcaggccgcgcaagttagatcgatttcatcccaaagaacttctggagtgtgcatttgatattgtcacttctaccaccaacagctttctgcccactgctgaaattatctacactatctatgaaatcatccaagagtttccagcacttcaggaaagaaattacagtatttatttgaaccataccatgttattgaaagcaatactcttacactgtgggatcccagaagataaactcagtcaagtctacattattctgtatgatgctgtgacagagaagctgacgaggagagaagtggaagctaaattttgtaatctgtctttgtcttctaatagtctgtgtcgactctacaagtttattgaacagaagggagatttgcaagatcttatgccaacaataaattcattaataaaacagaaaacaggtattgcacagttggtgaagtatggcttaaaagacctagaggaggttgttggactgttgaagaaactctgcat

SEQ ID NO: 754 - DNA, 439 bp, Homo sapiens
ctgccctcttgacatcccaaataaggaattcccgttaagtaaaacctgcagtgcaattcactcagtggttagtttcaggccaagcctccccctaccattatgcttgttcttccccaccgcccccaaatcctgcagtggcaccgtattattaaaaacactaagtacctgggatttatgcctcagagcaagacatcatttgagcaatttcaaatgatacacagctccttcatgtaaaaaagatgttttgtggtcacaattacttcaaaaagtaattatattcaaataacctgacatatcatgccttagcaattacaaaaccatgattttgacacatggcaatttttaagttaggcaaatgtaaaatgctaaaagatgtgaacagtgggcaagtgcattctcggtcagtcaaggcagcacaaggtaatttctcaatcattgg

SEQ ID NO: 755 - DNA, 466 bp, Homo sapiens
ctggaggccgaggagcagaggaagcagaagaagcggcagagtgtgtcgggcctgcacagataccttcacttgctggatggaaatgaaaattacccgtgtcttgtggatgcagacggtgatgtgatttccttcccaccaataaccaacagtgagaagacaaaggttaagaaaacgacttctgatttgtttttggaagtaacaagtgccaccagtctgcagatttgcaaggatgtcgtggatgccctcattctgaaaatggcagaaatgaaaaagtacactttagaaaataaagaggaaggatcactctcagatactgaagccgatgcagtctctggacaacttccagatcccacaacgaatcccagtgctggaaaggacgggccctcccttctggtggtggagcargtccgggtggtggatctggaagggagcctgaaggtggtgtacccgtccaaggccgacctgg

SEQ ID NO: 756 - DNA, 550 bp, Homo sapiens
  misc_feature 506: n = A,T,C or G
aaataaggcttggggtttttcccggtcttttggggaacttgaaactgaggtgggacttttcagaaactgttgctagtttcgctttatctgagtaccatctgttcttggccctgagccggggcccaggtgctcgaccacagatatcctgtttggcccctgtcccagttttgttcagccttattttttaactaaacttccttgtgacttttgagaactcagctctggtactttttcatgccttgcaaaatggcgttactgcagctagcttgctaagccttatggtggggtctttcattcccccctctttctggaaactgaataaaattttttatttacgcgattttactttttctggatttattgatttgagttggtgatactgttgggttagaactagggcctgcaccaccgaaattctgttttttacaaactggaccaagcggttgagaatgcagggtccgaggagtaggattaataaaagtactattagagggcccataatggtngatattagggtcgtgaaccgtggggacctgttaaacagtttttt

SEQ ID NO: 757 - DNA, 574 bp, Homo sapiens
ccaccattttgaagaccaccacagatctcaaggcatgagactactcaccaacaaaatctatccctgctattgcacctagtgtcatctcaatatgtggctgacagcaaatgttctaacttaatctgatagatgctcctttagcatataaaagagcttgctaagtccctattacctgtagcagtctatcaactaaatatttaagaagtcatttcatagacaaggtttatgaatgacttagaagtaaaattagtaatttctaaaccactgtagtgttttctatgtttttagagatattccaaacacagagttttcaaaggagctgtaaaaccaagtacaaacatacgtaagtaattttgtcatggatatttctgtactaatttgggggagactggtgggccataaataaatgaaatacacatcctaaaaataatggtaaaaatgatcaagtaccgctttcagatggttattcaagtatcaacttggtatgcaagtaagttcacccatgtcttcacctatgatttcatattcaaagcgctacatcttacttaggtactgataaatttagaagacttta

SEQ ID NO: 758 - DNA, 519 bp, Homo sapiens
aaagtcataatactttgtccagtagatgcagagttgctggtagtttatgactaattccaagaccgtccgaaatccctgggctgtgttgaaatgtgttttcatgctccctcgctcccaagcatagaccgtcaggagctccagggcatactgaggtggcagcttcccaagcttcttcttacaattttggtaccagtgcttgactaggcggatgaggctcttgagcttggtggggcgctgcttcaggaagtctctctgtagttctgtgaagcaggtggagaactcgccctctttctgcaggtcggtgcactcctcgatgagcttgacatagatttgggggttaggtttatagctgccagtcaactgacccagggcatcaaaggcaggcagcacatcgaactccaccccctccccgagctggagcgaactcagtacgaagctgagcgcacgggggttgccccagcgtggagcctggacctcaaacttcacggaaaatgctctctctctttgacaggcttccag

SEQ ID NO: 759 - DNA, 469 bp, Homo sapiens
aagcttaaatacacgtataggtaataattattttgcccatatacaagtaatgtaaacagaggctatcaaggtgacccattatctactctaatttatatccactatgagcttcttcccagttgttatacaatgccatattttaattcctgactgaatggttaggaaagcaaaatgtaactctgtaaacttgatcagcactaatgtacaacatattatggagggtaaagtgaagcaagaatatattcaagtaaaataaaatgtctttcatgggcattcaaatcccacatctctctatatttctttcccaactaagagctataattaaaatcccatttattatttttctatagttcagaatcaacgtataaaatatgatgaaagtgaaactatctccctatatatcacatcatatatattgtgagaaagtcacttgttatatatggatatttcaattaactcataaattttt

SEQ ID NO: 760 - DNA, 422 bp, Homo sapiens
tttttttttttttttggctctagagggggtagagggggtgctatagggtaaatacgggccctatttcaaagatttttaggggaattaattctaggacgatgggcatgaaactgtggtttgctccacagatttcagagcattgaccgtagtatacccccggtcgtgtagcggtgaaagtggtttggtttaracgtccgggaattgcatctgtttttaagcctaatgtggggacagctcatgagtgcaagacgtcttgtgatgtaattattatacgaatgggggcttcaatcgggagtactactcgattgccaacgtcaaggagtcgcaggtcgcctggttctaggaataatgggggaagtatgtaggagttgaarattartccgccgtartcggtgtactcgtaggttcagtaccattggtgg

SEQ ID NO: 761 - DNA, 605 bp, Homo sapiens
aaaatggcaattggtgtttctaagccattgactaataaaacatagggttggctagtaattattttgttaacttgatgaagtcaagtatgactattatttattgtacatttgataagacaatttttggaattttgaattgcacaaattacatgatatcttttgcatttatgttactatattgtacttctgacaaatctttattcctgggtggtatttttaagatatctttacctataaaaaatgtttaaggttcataggactcgacaagagctatctggtgattttctcattagtaacatgcaacgttgtactgcaaaatttcaatcaacatgacaacttataatgagtggagatttcatattaggtactaaatattatagtattatttctattttctttttccaaataagaagcttggattattttattttgtggtctttatcattaactttaattctttctgtactgtgtataatatttttatattattggtcttaccataaaattatttagaaaggttgtcaaaataagktatacctctttggcaatagatagatgtatacatctacctactatgatctacaattttaggttaagtgaagctt

SEQ ID NO: 762 - DNA, 526 bp, Homo sapiens
aaagagatgggggtcttactatgttggctaagctggtctcaaactccttgcctcaggtaatccttctgcctcagcctcccaaagtgctgagattacaggcatgagccaccatgcccgacttccctttgtgtaaaatgagataatatgtatgtcacagaattgttttaaggatgataaaggactaagtgagataatgtaggtgaagtttagtatgatgcctggctcatagttaagtgctgaattatgatagtaatcaatatctactcctaacctctttcttcacagattttaagcttctgtctttctagggggttaagagtcataaaccaaaattacactttcctctgctaggtttcctccctttcctcttcttgacagtctgatgggaaacaaaggcacacataagagcctagttccaagtagtcaagagcctgagaggaagggatatggagagtaatccttcatatctccaggagtgcctgtgaagaagctgaggaatgggactgggaaagcacacaaaataagg

SEQ ID NO: 763 - DNA, 481 bp, Homo sapiens
cctcactgacaagatgagttcccagtgtcaggaccccaatatccttccttacaaagagtggggatcccaccctagaaaaggaatagcagttcagtcaccccacagcagctctggcatggctgtttctggataccttcatggagaaatgcacacactgcccttcatttcaaagatgagcatcagtctcgtcttcagagaagatgcagccattgtggggttagggtttctctcctcaggtcactagtgtagatgcgcctgctgagaagtttcagccactccacctgcgggacggaggcagggtgcggcccggagaactcctccctgttccaacagcagctctccagcccgcagcgcttcctgacgttccgttagttcagtctcctgaacttctctgcatgtagattcctctcagggtagcctgtttacttagcgctggtgtacttggtgacggccttagtaccctcggacacggcgtgcttgg

SEQ ID NO: 764 - DNA, 509 bp, Homo sapiens
aaacttagtccaggatattttcctttgtgttttataactttacagaggaccaaagcaattcttgttttagtttctttgcgaagcctgctcctccttcccttcataaggactttttttgtctttctttaacgcccaggcttcgtcttatttctactgtttttgtcgcaacttccattgatttatgtcccttccctcccccctaagtacatcagggaacctttccacactataaatgatatgactactgtttggggtttctgggcccccatccgtgtacgtatgtggcatttccaggtatgactgagtgtgagagacatgtcagaggctcttcagtgatttcttgctattgaccgatgcttcactgtgccaaaagagaaaaaaaatgttgggttttgtaattaaattatttatatatttttgaaacccgaattgaaaatgttgcaggcaacgggctacagctttattagtggttctctaactgtggtctccttgggccaagcaatttcttt

SEQ ID NO: 765 - DNA, 440 bp, Homo sapiens
ccatgctgggggaacagttcatggttggggaggagatctgtggggctgtggtgtctgtccgctttcaggaagacattatttcaatatggaataagactgccagtgaccaagcaaccacagcccgaatccgggacacacttcggcgagtgcttaacctacctcccaacaccattatggaatacaaaactcacaccgacagcatcaaaatgccaggcaggctgggcccccaaaggctcctttttcaaaacctctggaagccgcggttgaatgtgccatgaccctctccctctctggatggcaccatcattgaagctggcgtcatcggagtctcttgttctgttggcgtgctacctggaagatccttctgtcctggacaagaggaattggaagagcattttatgttttaagaacaggctgacacgcagcagctacaacaacag

SEQ ID NO: 766 - DNA, 544 bp, Homo sapiens
aaatgggtcagaagttgtctttgacatttaccatgaaaaaactacataaaatggctccctggtgaggttacagacacggccctggtgatgggcgttgcaaagttttcactgagcacacagcaatggtatcacctagagaagttcacgcaactttgttgaatgtagttgacttttccaaatttataaaggaaggaagaaggcaaatgttaatttgccaacaacgaatatcctttttctaaatcagatcattccttttttgttagtggcagtttatcctgtaatttcaaatgacgttaagaggtgggattatttgggggttttttttgtttgtttacagatgatctcatttgctgaatgattgatttaagagtaaaattagccactgcgtggctttgtgtatagtaaccggttttgttgcacttgtctgtggctgaaacacttacctgcagtggaaagccgagcaaggaggaggtaaacattggagatgtttgtgaaaatattactcttgctgtgaggttttagtttgttttgaatgagaaaagac

SEQ ID NO: 767 - DNA, 570 bp, Homo sapiens
cagaaaagaaaaaaatagcagagaagataaaagagaaagaacggcaacagaagaaaaggcaagaagaaattaaaaagaggttagaagaacccgaagaacctaaagtgctaacaccagaagaacaattagcagataaactgcggctaaagaaattacaggaagagtcagacctcgaattagcaaaggaaacttttggtgttaataatgcagtttatggaatagatgctatgaacccatcttcaagagatgactttacagagtttggaaagttactaaaagataaaattacacaatatgaaaagtcactatattatgccagttttttggaagtcttagttcgagatgtgtgtatttcattggaaattgatgacttgaaaaaaattaccaattcactgactgtgctttgcagtgaaaaacagaagcaagaaaagcaaagcaaagccaaaaagaagaagaaaggtgtggttcctggagggggattaaaagccaccatgaaagatgatctggcagattatggtggttatgatggaggatatgtacaagactatgaagacttcatgtgacatttta

SEQ ID NO: 768 - DNA, 532 bp, Homo sapiens
aaaggttttcagtagtctatctgaaatcactgaatcacttttcttctcctccatagaattcagaactttttcaccccgaactggagaaggagcactccgtcattagctgaggggaatggcaaggatccaggggtcctccatgactacacaaccatcctcctgagcacctttaggaaatccaatgctgtctgagaagcagcagggccagatccagatctatggaaaattaatatctgcagtgcttcctgaaggtcacctcagtctttatgccatttcaaaagctagcccggggcttgagaagaaaagggaagtggcattccagccatatttggggtgcaatttaattttcattgcgtacctcatgaacaggggcaataacacattctaggacattcttccagcccacccactcttcctctttctcttcttctctttctctaacgagtggtagtgacaggatgcaagtctgcgctcttggtagataaacggagaagcaggagaaagaactattccataatcagttaacggggag

SEQ ID NO: 769 - DNA, 544 bp, Homo sapiens
aaataaggcttggggtttttcccggtcttttggggaacttgaaactgaggtgggactttccagaaactgttgctagtttcgctttatctgagtaccatctgttcttggccctgagccggggcccaggtgctcgaccacagatatcctgtttggcccctgtcccagttttgttcagccttattctttaactaaactttcttgtgacttttgagaactcagctctggtactttttcatgccttgcaaaatggcgttactgcagctagcttgctaagccttatggtggggtctttcattcccccctctttctggaaactgaataaaatcttttattcacgcgattctacttcttctggatctattgatttgagttggtgatactgttgggtcagaaccagggcctgcaccaccgaaattctgtcttttacaaactggaccaagcggttgagaatgcagggtccgaggagtaggattaataaaagtactatcagagggcccataatggtggatatcagggtcgtgaaccatggggacctgttaaacag

SEQ ID NO: 770 - DNA, 265 bp, Homo sapiens
ctgcagcctgggactgaccgggaggctctgattatttacccaccacaggtaggktgtgttctgaatctcaggttcacaggttaaggctacagcatcctcatcctccacggggttggagttgttgctggtgatgaagggtttgggtggctctgagaggacattcaggatgactgaatcactgcgcctggcactcactgggttctgggtttcacatttgtagcttgctgtgtcatttcttgtgacattgaatakagtgagggtcctg

SEQ ID NO: 771 - DNA, 372 bp, Homo sapiens
caagcactcaacctcaccagtcccgacagaacccaagagtgctggctgtgtctggtatcgggacccccctactacgaaggggttgccgtcctaggtacctactccaaccatacctctgccccagctaactgctccgtggcctcccaacacaagctgaccctgtccgaagtgaccgggcagggactctgcgtaggagcagttcccaaaacccatcaggccctgtgtaataccacccagaaggcgagcgacgggtcctactatctggctgctcccgccgggaccatctgggcttgcaacaccgggctcactccctgcctatctaccactgtactcaacctcaccaccgattactgtgtcctggttgagctctgg

SEQ ID NO: 772 - DNA, 409 bp, Homo sapiens
aaaaaacttagagagagagagagaatcaaaataacctatgaagatttatagaaaacacaccaggtaaggaagggttctttcaaagcaaccacaggaacagttacgataacttaaaaagaaatgctttccacactgaactgacagcgctgcagcccacgcctgagtggggacggcagccccaagcccaggggcaagcgcccacaggctggacccaggccaggcacacctggggagtctcttgctgctgaaaacctcagccatctcacttcatgtacttatcctgctggtcagccaggattttggcggaggacttggcatcatagaaaagttcactgatctcttcgacatgctctttctcaatgctgtccttcccgttgattttagcaagcaagttggccggggtcagcag

SEQ ID NO: 773 - DNA, 467 bp, Homo sapiens
aaaataaatattgtgctgtaaactgttcagaagcgaaatccatattacagtaggcaagtacaagggatagacagcacagtgttttgttagagtaaaccattctgagtctcagaagcatcaccaactgtctacatcagatagatactctgagagtaaacatactcataagaagaaaaaagtaatagataaaagttctgagagagaagcaacctattataaataagagtttcttgagattaacaagggtgaggacaactcccatgtgagcctctaccatgtgcccagtttctagtttaactacttgcagagagcagttgctatataaaaatctgttgaaaggatttcaggtactagaatttacatattttacatggtctctcatttacacctatcaatttctttcttcatgatctttacttcattagctacttacatatactataatttacataataaatctattattt

SEQ ID NO: 774 - DNA, 555 bp, Homo sapiens
cctacagacttatttcttcttggacacacccacggtgcggccacggcggccagtggtcttggtgtgctggcctcggacacgaaggccccagaagtgacgcagccctctatgggcccgaatcttcttcagtcgctccaggtcttcacggagcttgttgtccagaccattggctaggacctggctgtattttccatcctttacatccttctgtctgttcaagaaccagtctgggatcttgtactggcgtggattctgcatattcaccaacaccagcagcaacaatcaggacagcacagtcagcctgagatgtccctgtaatcatgtttttgataaagtctctgtgtcctggggcatcaatgatagtcacatagtacttgctggtctcaaatttccacaaggagatatcaatggtgataccacgttcacgctcagctttcagtttatccaagacccaggcatacttgaaggagccctttcccatctcagcagcctccttctcaaatttttcaatggttcttttgtcgatgccaccgcatttatagatcagatggacct

SEQ ID NO: 775 - DNA, 508 bp, Homo sapiens
ccaggctggtctcaaactcctgacctcaagtgatctgcccacctcggcctaccaaagtgccaggattataggcatgagccactgcacctggcccacgttgtgctttcttgaagtcagactatatatctaaaccctaaccccatataagattgtttgtaagcacgctgtgttttcttgaagtcagactgtagagccaggatgaattaattgtccataatgccatacatggccctatccacagccacatgctttctgcttatctattgcataggattatatgtgggaaaatggatcgagaagcttaaagtatgataatcctttgatatttggtactcagtgatctctctgaccttcttaagtggagcatactcaggaagctggctccttctagttttattgggttctcggaatgttcaaagtatccacctcacaccccgcgcagaaatcctccctttgcagccaggattatgactttacagagggaaaaagatatggcagctactagtgg

SEQ ID NO: 776 - DNA, 591 bp, Homo sapiens
ttggagcaaagactaatgcagttaatggaatcagagcagaaaagggtgaacaaagaagagtctctacaaatgcaggttcaggatattttggagcagaatgaggctttgaaagctcaaattcagcagttccattcccagatagcagcccagacctccgcttcagttctagcagaagaattacataaagtgattgcagaaaaggataagcagataaaacagactgaagattctttagcaagtgaacgtgatcgtttaacaagtaaagaagaggaacttaaggatatacagaatatgaatttcttattaaaagctgaagtgcagaaattacaggccctggcaaatgagcaggctgctgctgcacatgaattggagaagatgcaacaaagtgtttatgttaaagatgataaaataagattgctggaagagcaactacaacatgaaatttcaaacaaaatggaagaatttaagattctaaatgaccaaaacaaagcattaaaatcagaagttcagaagctacagactcttgtttctgaacagcctaataaggatgttgtggaacaaatggaaaaatgcattcaagaaaaagatgag

SEQ ID NO: 777 - DNA, 476 bp, Homo sapiens
aaaatatcttaatcagtgttaatttcccagtgtttcagtatcacagtaaatacttgttttactgagaacagaaaataatccagaaaaggaaaaggaccagccctctctagattgctggaattgtatggatgtgttggggttggtttagtgatctcttccttgacaccctagcaaagatgcttttgtggagtgcaaacctttcataaatatactttccaggctgggtgcagtggctcaagcttgtaatcccagcactttgggaggccaaggcgggtggatcacttgcggtcgggagttcgagaccagcctgaccaacatagtgaaatcccgtctctaccaaaaaatacaaaaaaaaatagtcaggtgtggtggtgggttcctgtagtcccagctactcaggaggctgaggtgggagaattgtatgaacctgggaggcagaggttgcagtgaactgagatcacaccactgtactccag

SEQ ID NO: 778 - DNA, 433 bp, Homo sapiens
ctgcctttgatcaagattcgggtgcaagtggagcaggagccatatacctggagggaatgtgctttgtcacaccaaagaggatttttttttcttcaaacttgtatgttgcctaggtttcaaattctttgccgcaaggctgatctgctttcattaactggaattctgtaggagatactggtgacctaagctaagttgcactcagcatactcagtgtcaagctaatgaggttctattataaaggttctacttttaatctgagggaaaacatgttcagggcttctagaacactaaaaaatttggcttaaaccagtgttcagtctggtgccaaacttcgaatggaatacaaattcacataatctgaactttgttcacaggttatcctaatagagtaattcttcactttgctctattgaactgtcttaaggatttgttt

SEQ ID NO: 779 - DNA, 490 bp, Homo sapiens
cgccgccgcttgtgctgcagccatgtctctagtgatccctgaaaagttccagcatattttgcgagtactcaacaccaacatcgatgggcggcggaaaatagcctttgccatcactgccattaagggtgtgggccgaagatatgctcatgtggtgttgaggaaagcagacattgacctcaccaagagggcgggagaactcactgaggatgaggtggaacgtgtgatcaccattatgcagaatccacgccagtacaagatcccagactggttcttgaacagacagaaggatgtaaaggatggaaaatacagccaggtcctagccaatggtctggacaacaagctccgtgaagacctggagcgactgaagaagattcgggcccatagagggctgcgtcacttctggggccttcgtgtccgaggccagcacaccaagaccactggccgccgtggccgcaccgtgggtgtgtccaagaagaaataagtctgtagg

SEQ ID NO: 780 - DNA, 532 bp, Homo sapiens
ccacagcaggactacagtcaagacaatcacagtctctgcggagctgcccaagccctccatctccagcaacaactccaaacccgtggaggacaaggatgctgtggccttcacctgtgaacctgagactcaggacgcaacctacctgtggtgggtaaacaatcagagcctcccggccagtcccaggctgcagacctgcccgggcggccgcccgggcaggtttggactctggattgatgctggaagtagatacgaaaatgagaagaacaatggaacagcgcactttctggagcatatggctttcaagggcaccaagaagagatcccagttagatctggaacttgagattgaaaatatgggtgctcatctcaatgcctatacctccagagagcagactgtatactatgccaaagcattctctaaagacttgccaagagctgtagaaattcttgctgatataatacaaaacagcacattgggagaagcagagattgaacgtgagcgtggagtaatccttagagagatgcaggaagtt

SEQ ID NO: 781 - DNA, 402 bp, Homo sapiens
caataacgaacagacaaatgacaaaacaacactgagacagacaagacgcgcggcgcggtttcggcgaaaaaccgaaagcaaaaattcagatggaggcggcgagggcttggacctctcgtctcctaaaagaaccacgtacccctccgacaaaggaggggctccaaatagtccgaatcggtcaggactcggacttactgattgggccacccagcgggcccctgatgcctctgagacgtctcccagggctgcggtcgggaatacgaactcgtcagttcttccacggaaccgccagatacagatctagttagctaactagtacagattcagacgcaggcgcaaaaagtagatgccggcacacacacacacgcacaaagacagagacggagacaaaacgatcgctgg

SEQ ID NO: 782 - DNA, 500 bp, Homo sapiens; identical to SEQ ID NO: 725

SEQ ID NO: 783 - DNA, 387 bp, Homo sapiens
aaaagaacttcccagtccatgcgaagagtacagtccaagaataaatcaaatttctgaacgcattttatgctacatatgtgtatactttgcgatcctcaggtgttcgtgccaaatattctctctcaataagtccttcaatacgtttcttaataacaactggacttggtaagaatcgcgccttcaactgctgagttacctccgctactagaacattgtgctgcatcttctttctagatttcattatccgcactatagcagcttctatctcatgttttctgtcgtcgwctactttctgccttgtttctttcctctctgggtcggattcaccttgtttggcagcaactgtddgaatcttgactctgtgtagkrkggatgtgaactgatcat

SEQ ID NO: 784 - DNA, 446 bp, Homo sapiens
ctgaaccctcgtggagccattcatacaggtccctaattaaggaacaagtgattatgctacctttgcacggttagggtaccgcggccgttaaacatgtgtcactgggcaggcggtgcctctaatactggtgatgctagaggtgatgtttttggtaaacaggcggggtaagatttgccgagttccttttactttttttaacctttccttatgagcatgcctgtgttgggttgacagtgagggtaataatgacttgttggttgattgtagatattgggctgttaattgtcagttcagtgttttaatctgacgcaggcttatgcggaggagaatgttttcatgttacttatactaacattagttcttctatagggtgatagattggtccaattgggtgtgaggagttcagttatatgtttgggattttttaggtagtgggtgttgagctt

SEQ ID NO: 785 - DNA, 511 bp, Homo sapiens
aaattccaaataacaatgttgttcataatagtagtaccaagcagagcttcttgcatcccttggacctcagcaaaagttagtatagtctcctcagggggcatcaaaaattggttttctttgcctcctccatcttctgcaaacgtcatgacttctacttgttgatcagaaagggtcccactgctactaactagcctcctctttgtcaggccaagcacagcttttatatttccagacttcagtagtacttgcttttcactttcatcatcagaggaacaaaacaatgccctgatctctctgatttccaaatttcccaaagctacacacacgagattatacacatcaggcactggaactatctgtaatactggaacctctgcgaagtgccaggtataaagtttttcccactgccaagcatccagagctttccaaagagaaactacatcttcgcaagcagttatgatacatggctctttacaaccggctctttcccaaaacatggcactcacatcta

SEQ ID NO: 786 - DNA, 512 bp, Homo sapiens
ctgcccctgaagaaggaatgagtagcgacagtgacattgaatgtgacactgagaatgaggagcaggaagagcataccagtgtgggcgggtttcacgactccttcatggtcatgacacagcccccggatgaagatacacattccagttttcctgatggtgaacaaataggccctgaagatctcagcttcaatacagatgaaaatagtggaaggtaattgccaaatcaagagaactgacttgcaagctaccttgaccctgaattttgctgtagttggtgctcaaatttgtcatcagtcagataatcagatttggtcttatttcttcattatctcgacctgaaatagtaatttggaaactgttggaaggtggcacagtttagtctaagacagcagtagtacatgggaaaaacagtatgggaagagttctttgtaatgtaaggaaataacaatgtagttctctattaatttagcaaatttgtacattcacaaaaggcagtttgtctactacagcag

SEQ ID NO: 787 - DNA, 469 bp, Homo sapiens
gctccctggaggatgcctgaattctacaaccggttcaagggccgcaatgacctgatggagtacgcaaagcaacacgggattcccatcccggtcactcccaagaacccgtggagcatggatgagaacctcatgcacatcagctacgaggctggaatcctggagaaccccaagaaccaagcgcctccaggtctctacacgaagacccaggacccagccaaagcccccaacacccctgacattctcgagatcgagttcaaaaaaggggtccctgtgaaggtgaccaacgtcaaggatggcaccacccaccagacctccttggagctcttcatgtacctgaacgaagtcgcgggcaagcatggcgtgggccgtattgacatcgtggagaaccgcttcattggaatgaagtcccgaggtatctacgagaccccagcgggcaccatcctttaccatgctcatttagacatcgagg

SEQ ID NO: 788 - DNA, 540 bp, Homo sapiens
ccaccaaacaattctgaggtggtcctacagaaccggagaggattagatctgctgttcctaaaagaaggaggattatgtgctgccctaaaagaagaatgctgtttctatgcagaccacactggcgtagtaagggatagcatggctaagctaagagaaaggctaaaccagaggcaaaaattgttcgaatcaggacaagggtggtttgagggactgtttaacaggtccccatggttcacgaccctgatatccaccattatgggccctctgatagtacttttattaatcctactcctcggaccctgcattctcaaccgcttggtccagtttgtaaaagacagaatttcggtggtgcaggccctggttctgacccaacagtatcaccaactcaaatcaatagatccagaagaagtagaatcgcgtgaataaaagattttattcagtttccagaaagaggggggaatgaaagaccccaccataaggcttagcaagctagctgcagtaacgccattttgcaaggcatgaaaaagtaccagagctgag

SEQ ID NO: 789 - DNA, 534 bp, Homo sapiens
  misc_feature 522: n = A,T,C or G
ctgttacagtgacaagagataaaaagatagacctgcagaaaaaacaaactcaaagaaatgtgttcagatgtaatgtaattggagtgaaaaactgtgggaaaagtggagttcttcaggctcttcttggaagaaacttaatgaggcagaagaaaattcgtgaagatcataaatcctactatgcgattaacactgtttatgtatatggacaagagaaatacttgttgttgcatgatatctcagaatcggaatttctaactgaagctgaaatcatttgtgatgttgtatgcctggtatatgatgtcagcaatcccaaatcctttgaatactgtgccaggatttttaagcaacactttatggacagcagaataccttgcttaatcgtagctgcaaagtcagacctgcatgaagttaaacaagaatacagtatttcacctactgatttctgcaggaaacacaaaatgcctccaccacaagccttcacttgcaatactgctgatgcccccagtaaggatatctttgttnaattgacaacaa

SEQ ID NO: 790 - DNA, 624 bp, Homo sapiens
ctgatgttgttaaacagtggaaggaaaagaagaaaaagaaaaagccaattcaggagccagaggtgcctcagattgatgttccaaatctcaaacccatttttggaattcctttggctgatgcagtagagaggaccatgatgtatgatggcattcggctgccagccgttttccgtgaatgtatagattacgtagagaagtatggcatgaagtgtgaaggcatctacagagtatcaggaattaaatcaaaggtggatgagctaaaagcagcctatgaccgggaggagtctacaaacttggaagactatgagcctaacactgtagccagtttgctgaagcagtatttgcgagaccttccagagaatttgcttaccaaagagcttatgcccagatttgaagaggcttgtgggaggaccacggagactgagaaagtgcaggaattccagcgtttactcaaagaactgccagaatgtaactatcttctgatttcttggctcattgtgcacatggaccatgtcattgcaaaggaactggaaacaaaaatgaatatacagaacatttctatagtgctcagcccaactgtgcagatcagcaatcgagtcctgtatgtgtttttcacacatgtgc

SEQ ID NO: 791 - DNA, 302 bp, Homo sapiens
aaatcacttctatcttctgtacttaagaactcaagtatagaaataaactgtgggctgaagtaacattgtaacctgctcccaacatgactgcataggtgtctaaggttaagtgtgaagattactgtgaggactcaagttacttgactaatcaatcccatttgaatttcaatccaagcagcgtattttacacacacctgaaggaaatatcttcagtgtgttcatgtgtgtgtctatgtgcatgtatgtgtaggggataggtgtaattagggaagggctgaccgaacaacattgataagtacatg

SEQ ID NO: 792 - DNA, 468 bp, Homo sapiens
tgaagatagatcgccatcatgaacgacaccgtaactatccgcactagaaagttcatgaccaaccgactacttcagaggaaacaaatggtcattgatgtccttcaccccgggaaggcgacagtgcctaagacagaaattcgggaaaaactagccaaaatgtacaagaccacaccggatgtcatctttgtatttggattcagaactcattttggtggtggcaagacaactggctttggcatgatttatgattccctggattatgcaaagaaaaatgaacccaaacatagacttgcaagacatggcctgtatgagaagaaaaagacctcaagaaagcaacgaaaggaacgcaagaacagaatgaagaaagtcagggggactgcaaaggccaatgttggtgctggcaaaaagtgagctggagattggatcacagccgaaggagtaaaggtgctgcaatgatgttagctgtgg

SEQ ID NO: 793 - DNA, 547 bp, Homo sapiens
  misc_feature 496, 508: n = A,T,C or G
ctggcctcagcccgccacatcaccctgacctgcttacgcccagattttcttcaatcacatctgaataaatcacttgaagaaagcttatagcttcattgcaccatgtgtggcatttgggcgctgtttggcagtgatgattgcctttctgttcagtgtctgagtgctatgaagattgcacacagaggtccagatgcattccgttttgagaatgtcaatggatacaccaactgctgctttggatttcaccggttggcggtagttgacccgctgtttggaatgcagccaattcgagtgaagaaatatccgtatttgtggctctgttacaatggtgaaatctacaaccataagaagatgcaacagcattttgaatttgaataccagaccaaagtggatggtgagataatccttcatctttatgacaaaggaggaattgagcaaacaatttgtatgttggatggtgtgtttgcatttgttttactggatactgccaataagnaaagtgttcctnggtagagatacatatggagtcagacctttgtttacctcg

SEQ ID NO: 794 - DNA, 434 bp, Homo sapiens
ccacacactacctataagatgtgatgaagtttctttacttaacctgacattgctactcaaaaacttgtacttttgggggaaaacagtactaattatgttaaaacaaagtttatgccatatataaaatcactccaaattacacactcattgctttctatagctctacgaatttataatacataatttagaagaaaatcacaaatagattaccataggtggcattcaacttttcttaatccaattcagcctatccattaaaaccaagaaccttctgcgcggcctgccagttccccattccttttgtcaacttaaaaaagaagcatttcttgggaagtcaggatttattaagaacatcgggatcccagatatttctttttttaccatataccttaacatttgggggattttgattcccacaaaaacctctatcattt

SEQ ID NO: 795 - DNA, 494 bp, Homo sapiens
ctgtctcttacttttaaccagtgaaattgacctgcccgtgaagaggcgggcatgacacagcaagacgagaagaccctatggagctttaatttattaatgcaaacagtacctaacaaacccacaggtcctaaactaccaaacctgcattaaaaatttcggttggggcgacctcggagcagaacccaacctccgagcagtacatgctaagacttcaccagtcaaagcgaactactatactcaattgatccaataacttgaccaacggaacaagttaccctagggataacagcgcaatcctattctagagtccatatcaacaatagggtttacgacctcgatgttggatcaggacatcccgatggtgcagccgctattaaaggttcgtttgttcaacgattaaagtcctacgtgatctgagttcagaccggagtaatccaggtcggtttctatctacttcaaattcctccctgtacgaaaggacaagagaaataagg

SEQ ID NO: 796 - DNA, 524 bp, Homo sapiens
ccaacaaaattggtgaacacatggaagaacatggcatcaagtttataagacagttcgtaccaattaaagttgaacaaattgaagcagggacaccaggccgactcagagtagtagctcagtccaccaatagtgaggaaatcattgaaggagaatataatacggtgatgctggcaataggaagagatgcttgcacaagaaaaattggcttagaaaccgtaggggtgaagataaatgaaaagactggaaaaatacctgtcacagatgaagaacagaccaatatgccttacatctatgccattggcgatatattggaggataaggtggagctcaccccagttgcaatccaggcaggaagattgctggctcagaggctctatgcaggttccactgtcaagtgtgactatgaaaatgttccaaccactgtatttactcctttggaatatggtgcttgtggcctttctgaggagaaagctgtggagaagtttggggaagaaatatttgaggtttaccatagttacttttgg

SEQ ID NO: 797 - DNA, 66 bp, Homo sapiens
aaattgtaaaaagtattcaacatatgcagaaataaaaagcattttgatggctgggcgcgggggctc

SEQ ID NO: 798 - DNA, 512 bp, Homo sapiens
ctgaagaagttgcagctcgccttgcacaacaggaaaaacaagaacaagttaaaattgagtctctagccaagagcttagaagatgctctgaggcaaactgcaagtgtcactctgcaggctattgcagctcagaatgctgcggtccaggctgtcaatgcacactccaacatattgaaagccgccatggacaattctgagattgcaggcgagaagaaatctgctcagtggcgcacagtggagggtgcattgaaggaacgcagaaaggcagtagatgaagctgccgatgcccttctcaaagccaaagaagagttagagaagatgaaaagtgtgattgaaaatgcaaagaaaaaagaggttgctggggccaagcctcatataactgctgcagagggtaaacttcacaacatgatagttgatctggataatgtggtcaaaaaggtccaagcagctcagtctgaggctaaggttgtatctcagtatcatgagctggtggtccaagctcgggatgacttt

SEQ ID NO: 799 - DNA, 439 bp, Homo sapiens
aaactcaatcttgatttaagggaaaggctataaattattggctgaaaagtattcagcatgaactcagattctatataagcatgaaagagtacaaaagatgttggagtccagtaagcccatacctaaattaactgtaaagcttcaaggactttttgtttatttttatatactagttttcttctgtgacaagttgattttatctccaagacttaaggccattccctggctctttgcacgaattcttatatggccggtaacagcagcatctggtccctggtgaattggcttctcaatgctgacatttgcaagtgcatcttcaccaaatatggaacgagcataaaggttggctgccataaagccacagtaaccagaaagggccttttctggagtcaggcatttcatattggttgactttaatatgtgctgtaagtagtcattt

SEQ ID NO: 800 - DNA, 456 bp, Homo sapiens
gtaacccacaggctgaggaattcctctacagattcttgccacagaaaatcatatacctgaatcagctcttgcaagaggactccctcaatgtggctgacttgacttccctccgggccccactggacatccccatcccagaccctccacccaaggatgatgagatggaaacagataagcaggagaagaaagaagtccctaagtgtggatttctccctgggaatgagaaagtcctgtccctgcttgccctggttaagccagaagtctggactctcaaagagaaatgcattctggtgattacatggatccaacacctgatccccaagattgaagatggaaatgattttggggtagcaatccaggagaaggtgctggagagggtgaatgccgtcaagaccaaagtggaagctttccagacaaccatttccaagtrcttctcadaacgtggggatgctgtgg

SEQ ID NO: 801 - DNA, 494 bp, Homo sapiens; identical to SEQ ID NO: 795

SEQ ID NO: 802 - DNA, 501 bp, Homo sapiens
aaaaagtatcttgatggttcttttctatttataatttcagactttcataaagtgtaccaagaatttcataaatttgttttcagtgaactgctttttgctatggtaggtcattaaacacagcacttactcttaaaaatgaaaatttctgatcatctaggatattgacacatttcaatttgcagtgtctttttgactggatatattaacgttcctctgaatggcattgatagatggttcagaagagaaactcaatgaaataaagagaatatttattcatggcgattaattaaattatttgcctaacttaagaaaactactgtgcgtaactctcagtttgtgcttaactccatttgacatgaggtgacagaagagagtctgagtctacctgtggaatatgttggtttattttcagtgcttgaagatacattcacaaatacttggtttgggaagacaccgtttaattttaagttaacttgcatgttgtaaatgcgttttatgttt

SEQ ID NO: 803 - DNA, 495 bp, Homo sapiens
aaaaaattacagaaagaacaaagaactaaaagaattttaataaaatgagcaagtttacatttgtacattttgtgtatctgggacccaatcgggacaaaggataaagttgcaaggacaaaggtttctgtgggagagcaagcaaaaagcaagggctgccccagttgcatcatgggcatccattcagagctgggaccccgcagccacctgcctgtgctccggaagtgagaagcacatgtaagcacgcgtcagtgagagcgtcgcagttgaactcagcccagtgcaacgcagcctgagtgacatccctacattaatacttgatagggaacagcagataaacagttccaaaaaccaaatggtattgcccatagaatatgaatgtaaactgagttcagttcatgctgttttaaccagaatggttccactgaacctaatgaggggaaaaaggtctgatggatctaattgctctattcgatggcacagttacaaatcagcagg

SEQ ID NO: 804 - DNA, 471 bp, Homo sapiens
ctgcagatctcagaattgtccccaggttcccagggtcacggagattgtcacaaatcaataataaaggcagtgaatgctgaagctgagtctttggatatgtcatcttaatatggtcagtcttggcaaaaatccccattattccttgtggcgttacgaggtcggaccaatccttgatatcctcaaatttcaccttaatgaggctgacacctttcagcttatcgactggcaactcctttaggtattctagacggctaaagaagaacatttttggcacagctccagccttgagagcgtctgaaatgagcctgcgaccttccagcaggatcttcccttgtttttcccgaaatggcctggactttactattgtcattacactgctcagcctcctgtccccgggataagctttatcgtagcgaagcccagactcttcccaggtgctgggagcgcgggatgcggactcctcgagcggtt

SEQ ID NO: 805 - DNA, 535 bp, Homo sapiens
  misc_feature 516: n = A,T,C or G
ctgtccaatggtaacaggaccctcactctattcaatgtcacaagaaatgacacagcaagctacaaatgtgaaacccagaacccagtgagtgccaggcgcagtgattcagtcatcctgaatgtcctctatggcccggatgcccccaccatttcccctctaaacacatcttacagatcaggggaaaatctgaacctctcctgccacgcagcctctaacccacctgcacagtactcttggtttgtcaatgggactttccagcaatccacccaagagctctttatccccaacatcactgtgaataatagtggatcctatacgtgccaagcccataactcagacactggcctcaataggaccacagtcacgacgatcacagtctatgcagagccacccaaacccttcatcaccagcaacaactccaaccccgtggaggatgaggatgctgtagccttaacctgtgaacctgagattcagaacacaacctacctgtggtgggtaaataatcagagcctcccnggtcagtcccaggctgcag

SEQ ID NO: 806 - DNA, 541 bp, Homo sapiens
aaagggaaactgatcatgagatttgatgacacaaatcctgaaaaagaaaaggaagattttgagaaggttatcttggaagatgttgcaatgttgcatatcaaaccagatcaatttacttatacttcggatcattttgaaactataatgaagtatgcagagaagctaattcaagaagggaaggcttatgtggatgatactcctgctgaacagatgaaagcagaacgtgagcagaggatagaatctaaacatagaaaaaaccctattgagaagaatctacaaatgtgggaagaaatgaaaaaagggagccagtttggtcagtcctgttgtttgcgagcaaaaattgacatgagtagtaacaatggatgcatgagagatccaaccctttatcgctgcaaaattcaaccacatccaagaactggaaataaatacaatgtttatccaacatatgattttgcctgccccatagttgacagcatcgaaggtgttacacatgccctgagaacaacagaataccatgacagagatgagcagttttactgga

SEQ ID NO: 807 - DNA, 538 bp, Homo sapiens
aaaccttctttggggactggaagccaaactcctcaaacaaaagcctcaatctgaaccaacactgagagacagtaatgtcagaggctcttttgtttttcacggagagcaaaaatacagaatatatttattaatttattttccaataaagagaatatactttgtatttggagaaaaaaatgcttaattgtcaggagttgctttcggagaatgatcaataagttccttgtcaattgtctcatagtaataccagggtccatctcctctcacatgcatcaattttcgcacttccagctcctttacccgtaattcagccttttcagcttcaatctgaaggacggccattgttctttcatatatcttttcaggactatcatagaaattacgggcaatccatcttgatatgggatgcttataatattcccagtgttctgggacatagccttctggaatttctgctagttcagcttgaccaatgaatacattcaccagagttatgaaaattgctactggaatcccagtcaatgcaatgtagaatctc

SEQ ID NO: 808 - DNA, 482 bp, Homo sapiens
cgacgctgccttactaccagcccatcccgggcgggctcaacgtgggaatgtctgtttacatccaaggagtggccagcgagcacatgaagcggttcttcgtgaactttgtggttgggcaggatccgggctcagacgtcgccttccacttcaatccgcggtttgacggctgggacaaggtggtcttcaacacgttgcagggcgggaagtggggcagcgaggagaggaagaggagcatgcccttcaaaaagggtgccgcctttgagctggtcttcatagtcctggctgagcactacaaggtggtggtaaatggaaatcccttctatgagtacgggcaccggcttcccctacagatggtcacccacctgcaagtggatggggatctgcaacttcaatcaatcaacttcatcggaggccagcccctccggccccagggacccccgatgatgccaccttaccctggtcccggacattgccatcaacag

SEQ ID NO: 809 - DNA, 526 bp, Homo sapiens
aaagttcaaggactaaccttatttatttgggaaaggggaggaggaaggaaatgatatggtacccagacactgggctaggctgcaactttatctcatttaatactcccagttggaacaccggtggcactgttaactgctttctgggcagcctctttagcttggtgggcttgtagtacagctacagcttcatcaaccttagaacggagtgactctggagactcgagcatatgaagaagttctgaattatcaatctccaacaacatgccagtgattttaccagcaagagtagggtgcatggcttgaataagaggaaacagccgttcacccaacatttgcttttgctcttgaggaggggcagatgccaacatggaagcagtcaaaggttcctgaccttgtacatgaacagcaggctgttgcattgtaacttgtggctgtgcattaagatgttgctgaggattgcgaactcctgcagcatatttatactgtggaacggtgcggacagcaggagtagttgcagcggctgcag

SEQ ID NO: 810 - DNA, 444 bp, Homo sapiens
cccttcctctcaggctcttgactacttggaactaggctcttatgtgtgcctttgtttcccatcagactgtcaagaagaggaaagggaggaaacctagcagaggaaagtgtaattttggtttatgactcttaaccccctagaaagacagaagcttaaaatctgtgaagaaagaggttaggagtagatattgattactatcataattcagcacttaactatgagccaggcatcatactaaacttcacctacattatctcacttagtcctttatcatccttaaaacaattctgtgacatacatattatctcattttacacaaagggaagtcgggcatggtggctcatgcctgtaatctcagcactttgggaggctgaggcagaaggattacctgaggcaaggagtttgagaccagcttagccaacatagtaagacccccatctcttt

SEQ ID NO: 811 - DNA, 457 bp, Homo sapiens
cggcatcatgattggagtgctggttggggttgctctgatatagcagccctggtgtagtttcttcatttcaggaagactgacagttgttttgcttcttccttaaagcatttgcaacagctacagtctaaaattgcttctttaccaaggatatttacagaaaagactctgaccagagatcgagaccatcctagccaacatcgtgaaaccccatctctactaaaaatacaaaaatgagctgggcttggtggcgcgcacctgtagtcccagttactcgggaggctgaggcaggagaatcgcttgaacccgggaggtggagattgcagtgagcccagatcgcaccactgcactccagtctggcaacagagcaagactccatctcaaaaagaaaagaaaagaagactctgacctgtactcttgaatacaagtttctgataccactgcactgtctgagaatttc

SEQ ID NO: 812 - DNA, 515 bp, Homo sapiens
  misc_feature 473: n = A,T,C or G
aaattctgtgtgtgtgtgtgtaaaatgccaattaagaacactggtttcattccatgtaagcattaaacagtgtatgtaggtttcaagagattgtgatgattcttaaattttaactaccttcacttaatatgcttgaactgtcgccttaactatgttaagcatctagactaaaagccaaaatataattattgctgcctttctaaaaacccaaaatgtagttctctattaacctgaaatgtacactagcccagaacagtttaatggtacttactgagctatagcatagctgcttagttgtttttgagattttttagtcaacacataatggaaacttctttcttctaaaagttgccagtgccacttttaagaagtgaatcactatatgtgatgtaaaagttattacactaaacaggataaacttttgaccccccttttgttcatttgtggattaagtggtataatacttaattttngcatttgactcttaagattatgtaacctagctactttgggat

SEQ ID NO: 813 - DNA, 501 bp, Homo sapiens
aaacaaaggtctgactccatatgtatctctacccaggaacactttcttattggcagtatccagtaaaacaaatgcaaacacaccatccaacatacaaattgtttgctcaattcctcctttgtcataaagatgaaggattatctcaccatccactttggtctggtattcaaattcaaaatgctgttgcatcttcttatggttgtagatttcaccattgtaacagagccacaaatacggatatttcttcactcgaattggctgcattccaaacagcgggtcaactaccgccaaccggtgaaatccaaagcagcagttggtgtatccattgacattctcaaaacggaatgcatctggacctctgtgtgcaatcttcatagcactcagacactgaacagaaaggcaatcatcactgccaaacagcgcccaaatgccacacatggtgcaatgaagctataagctttctgggcgtaagcaggtcagggtgatgtggcgggctgaggc

SEQ ID NO: 814 - DNA, 418 bp, Homo sapiens
aaagacaaaaaaattcttttatgtacaatatcttgtctagagtctagcaaatatagtacctttcattgcaggatttctgcttaatataacaagcaaaaacaaacaactgaaaaaatataaaccaaagcaaaccaaaccccccgctcaactacaaatgtcaatattgaatgaagcattaaaagacaaacataaagtaacttcagcttttatctagcaatgcagaatgaatactaaaattagtggcaaaaaaacaaacaacaaacaacaaacaaaacaaaacaaacaaacaaaaaatcccaccaatcttcatgggtaaactttcctgctcagggatgtaagctgactctagaccatctcgcggttcctgcggatagcacagcacaagatcatactgaagatcatgccaaatatcatgacc

SEQ ID NO: 815 - DNA, 604 bp, Homo sapiens
  misc_feature 561: n = A,T,C or G
aaaaatttttgtttggttatatcaaaatagttacaggcactaaagttagtaaagaaaagtttaccatctgaaaaagctggattttctttaagaggttgattataaagttttctaaatttatcagtacctaagtaagatgtagcgctttgaatatgaaatcataggtgaagacatgggtgaacttacttgcataccaagttgatacttgaataaccatctgaaagtggtacttgatcatttttaccattatttttaggatgtgtatttcatttatttatggcccaccagtctcccccaaattagtacagaaatatccatgacaaaattacttacgtatgtttgtacttggttttacagctcctttgaaaactctgtgtttggaatatctctaaaaacatagaaaacactacagtggtttagaaattactaattttacttctaagtcattcataaaccttgtctatgaaatgacttcttaaatatttagttgatagactgctacaggtaatagggacttagcaagctcttttatatgctaaaggagcatctatcagattaagntagaacatttgctgtcagccacatattgagatgacactaggtg

SEQ ID NO: 816 - DNA, 154 bp, Homo sapiens
  misc_feature 141: n = A,T,C or G
ccttggatggtatactgtaaattcagcatatggagataccattatcataccttgccgacttgacgtacctcagaatctcatgtttggcaaatggaaatatgaaaagcccgatggctccccagtatttattgccttcagatnctctacaaagaaa

SEQ ID NO: 817 - DNA, 484 bp, Homo sapiens
ctggatgtgagagacaacatggtgaaacttaatgatggctctcaaataacctatgaaaagtgcttgattgcaacaggaggtactccaagaagtctgtctgccattgatagggctggagcagaggtgaagagtagaacaacgcttttcagaaagattggagactttagaagcttggagaagatttcacgggaagtcaaatcaattacgattatcggtgggggcttccttggtagcgaactggcctgtgctcttggcagaaaggctcgagccttgggcacagaagtgattcaactcttccccgagaaaggaaatatgggaaagatcctccccgaatacctcagcaactggaccatggaaaaagtcagacgagagggggttaaggtgatgcccaatgctattgtgcaatccgttggagtcagcagtggcaagttacttatcaagctgaaagacggcaggaaggtagaaactgaccacatagtggcag

SEQ ID NO: 818 - DNA, 457 bp, Homo sapiens; identical to SEQ ID NO: 405

SEQ ID NO: 819 - DNA, 595 bp, Homo sapiens
cctaaacaggtaacagtaaagcgactactgctggaaggagtggtgtgccacatgcgccttaagcctcaagagtggggactgcagggccaaacaccaaatacatcacctttaggccagacggagagtggagacccaggaagcccatgcaaccaccatctgccccctcccctagtgctgcagaaccggctggacactgtcacattttcagaagaactggaggtgggtcctgatcatattacatgaagccttccaccattgtgaacaattaggcaaggcatgagtgacagaggggcatcgctgataaatacagagcaatactggggcagtgaagaggaagctacagagacattcgtgtttcttcaaatatcagaagcttccacatcacagcaggagagctgacgacgagctccacctcctgaaggcttagtccaaaaacttcctgttggcatttgcaccaaacaaggctccccggacttctggcatcatctgctgggctatgagatccagccggctttccagggtgttggaaacctttattttacgatctccattatagatctcaactccaccagctatgtcttcaggcaggtaggac

SEQ ID NO: 820 - DNA, 540 bp, Homo sapiens
ctggaacgtcagcccagcgagccgaactgatcgcactcacccaagccctgaaaatggcagaaggtaagaagctaaatgtttacactgatagccgctatgccttcgctacggcccatgttcatggggaaatatataggagacgggggttgctgacctcagaaggcaaggaaatcaagaacaaaagcgagatcctagccttgctgaaagccctctttttgccaaagagactcagtattatccattgcccaggacatcagaaaggagacagtgccgaagccagaggcaaccgtatggcagaccaggcggcccgagaggcagccacaaaaacagttccagaagcctctacactccttatagaggactcgaccccgtacacgcctgcctatctccattacaccgaaacagatctaaaaagattgcgagaactgggggccacctataatcagataaaaggatattgggtcctacaaggcaagccggtgatgcccgatcagtttgtgtttgaattattaaactcccttcatagactcacccatctca

SEQ ID NO: 821 - DNA, 513 bp, Homo sapiens
cctcgtcctcctgggtagaatcctctcggaatcactccgcaggaaacgttactcaagactggattatttgatcaatgggatctatgtggacatctaaggatggaactcggtgtctcttaattcatttagtaaccagaagcccaaatgcaatgagtttctgctgacttgctagtcttagcaggaggttgtattttgaagacaggaaaatgcccccttctgctttcctttttttttttggagacagagtcttgctctgttgcccaggctggagtgcagtagcacgatctcggctctcaccgcaacctccgtctcctgggttcaagcgattctcctgcctcagcctcctaagtatctgggattacaggcatgtgccaccacacctgggtgatttttgtatttttagtagagacggggkttcaccatgttggtcaggctggtctcaaactcctgacctagtgatccaccctcctcggcctcccaaagtgctgggattacaggcatgagccaccacag

SEQ ID NO: 822 - DNA, 534 bp, Homo sapiens
ctgatgtgtcctgtacacagtgggaagattttagttcacacttagtctaactcccccattttacagatttctcactatatatatttctagaaggggctatgcatattcaatgtattgagaaccaaagcaaccacaaatgcataaatgcataatttatggtcttcaaccaaggccacataataacccagttaacttactctttaaccaggaatattaagttctataactagtactcaaggtttaaccttaaaattaagatttccttaaccttaaccttaaaattgatattatattaaacatacataatacaatgtaactccactgttctcctgaatattttttgctctaatctctctgccgaaagtcaaagtgatgggagaattggtatactggtatgactacgtcttaagtcagatttttatttatgagtctttgagactaaattcaatcaccaccaggtatcaaatcaacttttatgcagcaaatatatgattctagtgtctgacttttgttaaattcagtaatgcagttttt

SEQ ID NO: 823 - DNA, 456 bp, Homo sapiens
ccagaaattctcccttgcctccttgattgaggtgtcccagatgtagtattcccacaggggtctggcaggcccctcctgtaaccactccagtcacattttctgctcttgaggcagaggtgacatcaggacgtttacagcctccacatgaattgagtgttcatttacctcagtattaccgtgttcatttttgtcctcgtgctacagttagctccctgccgcctcttgcaggtcttacttcaactcttgcctgtgacccacacagcttctgggctctgcctctgctctaagaagtgctgtgggggtagagaaccaggaaggacatgctgttgggaatgtacacctgggcagaggtggccctgttaagatgtgactgtagccacagccagggatgggatccctgggtctctggaatctgaaacctcaacaaataccagtcttgacccctagcagcagaga

SEQ ID NO: 824 - DNA, 521 bp, Homo sapiens
ccaagccgtgtggggtgcgtctgagcggggaagcccgcaaacaggtggaggtcttcaggcagaatcttttccaggaggctgaggaattcctctacagattcttgccacagaaaatcatatacctgaatcagctcttgcaagaggactccctcaatgtggctgacttgacttccctccgggccccactggacatccccatcccagaccctccacccaaggatgatgagatggaaacagataagcaggagaagaaagaagtccctaagtgtggatttctccctgggaatgagaaagtcctgtccctgcttgccctggttaagccagaagtctggactctcaaagagaaatgcattctggtgattacatggatccaacacctgatccccaagattgaagatggaaatgattttggggtagcaatccaggagaaggtgctggagagggtgaatgccgtcaagaccaaagtggaagctttccagacaaccatttccaagtacttctcaracgtggggatgctgtgg

SEQ ID NO: 825 - DNA, 395 bp, Homo sapiens
cctggtttctgggtaatgcctcccttgggcatcttcatgcatcaaccaaatgggccatcaggtacttcattagtcatggcagaaggaggggaaaagacttgttttccagacagaaaatctactcccctgtccccagccatatccctggataggaagggataggaagagactacttggtgccatggggtaggggtgagggtataagtagatcagagtgggaagacctcagccttgggtggcttgtctctgcttcttgccaggtgggagggcctgtccacaccctggatccccgtaccacagtgccagccatgcccttcccctgggctaccattgtccctttcctcacccagttggtagaggagtcaggaggtgggaggccgtgggctttggtttta

SEQ ID NO: 826 - DNA, 446 bp, Homo sapiens
aaaagatgcctttttctgcctgagactccaccccaccagtcagcctctctttgcctttaagtggagagatccagaaatgggaatctctggacaattgacctggaccagactcccacagggtttcaaaaacagtcccaccctgtttaataaggcattgcacagagacctagcagacttccggatccagcacccagacttaatcctgctacagtacgtggatgacttactgctggccgctacttccgaactagactgccaacaaggtactcgggcccttctacaaaccctaggggacctcggataccgggcctcggccaaaaaagcccaaatctgccagaaacaggttaaatacctggggtaccttctgagggagggtcagaaatggctgactgaggctagaaaagaaactgtaatggggcaacccgttccaaagactcctcgacaac

SEQ ID NO: 827 - DNA, 478 bp, Homo sapiens
  misc_feature 463: n = A,T,C or G
ctgaaccctcgtggagccattcatacaggtccctaattaaggaacaagtgattatgctacctttgcacggttagggtaccgcggccgttaaacatgtgtcactgggcaggcggtgcctctaatactggtgatgctagaggtgatgtttttggtaaacaggcggggtaagatttgccgagttccttttactttttttaacctttccttatgagcatgcctgtgttgggttgacagtgagggtaataatgacttgttggttgattgtagatattgggctgttaattgtcagttcagtgttttaatctgacgcaggcttatgcggaggagaatgttttcatgttacttatactaacattagttcttctatagggtgatagattggtccaattgggtgtgaggagttcagttatatgtttgggattttttaggtagtgggtgttgagcttgaacgctttcttaattngtggctgcttttagg

SEQ ID NO: 828 - DNA, 497 bp, Homo sapiens
ccttacccctcgtgaattcaactcttacggagctcgaagaggtaatgatgctgtaatgacaaggggcacttttgcaaatatcaagctttttaataagtttattggaaaaccagctcctaaaacaattcattttccatcaggacagacgctagatgtatttgaggctgcagagctgtaccagaaagaaggtatcccactgattattttagcaggaaagaaatatggttcaggaaactccagagactgggctgccaaaggaccgtatttactgggtgtgaaagctgttttggctgaaagttatgaaaaaatacacaaagatcatttgattggaattggcatagctccacttcagttccttccaggagaaaatgcagattccttgggcctctccggtagagaaacattttctttaacatttcctgaagaactgtctcctggaattacattgaatatacagacaagcactggaaaagtattcagcgtgattgcttcgtttg

SEQ ID NO: 829 - DNA, 572 bp, Homo sapiens
aaagatgtgggagcaaaagctgacagagcagtccaacaccccgcttctcttgcctcttgctgcaagaatgtctgaggagtcttactttgaatctaaaacagaggagtcaaacagtgcagagatgtcatgtcagatcacagcaacaagtaacggggagggccatggcatgaacccaagtctgcaggccatgatgctgatgggctttggggatatcttctcaatgaacaaagcaggagctgtgatgcattctgggatgcagataaacatgcaagccaagcagaattcttccaaaaccacatctaagagaagggggaagaaagtcaacatggctctggggttcagtgattttgacttgtcagaaggtgacgatgatgatgatgatgacggtgaggaggaggataatgacatggataatagtgaatgaaagcagaaagcaaagtaataaaatcacaaatgtttggaaaacacaaaagtaacttgtttatctcagtctgtacaaaaacagtaaggaggcagaaagccaagcactgcatttttaggccaatcacatttacatgaccgtaatttcttat

SEQ ID NO: 830 - DNA, 546 bp, Homo sapiens
aaatcaatggtagaaagggaatttagactactcattcacactgagataaagtgacatttttgttgcacaacagtattgctcactggcactaacagtggaagatggagaaagtagatttctggattcaattgttagcagcagaaatggactaatgctaaaaatttagaaaaaaatagtccaagctgtagcgatttccaagtaatacaaacattaaccaaacattgccaatttgtaacgggctgtgaaaaacatatgaaaatactctacattgaatactagctttatgttactttctattaaagatattcagtgggcatattctaaattatatagggcttctatagagacctaaactagcaagtataatatgaagctaacaggacagtgtcagcatatcttgggatgttctagccaatgtttggctacaagtatttggaaggggtcaaataactatatgcacattcaaaatgaatacttataaaaagaaatcttaatgtatcagatatccacagactgaaaagtgttacacatgttgtggggggaaaa

SEQ ID NO: 831 - DNA, 490 bp, Homo sapiens; identical to SEQ ID NO: 779

SEQ ID NO: 832 - DNA, 126 bp, Homo sapiens
aaataaggcttggggtttttcccggtcttttggggaacttgaaactgaggtgggactttccagaaactgttgctagtttcgctttatctgagtaccatctgttcttggccctgagccggggcccag

SEQ ID NO: 833 - DNA, 546 bp, Homo sapiens
ccaccattttgaagaccaccacagatctcaaggcatgagactactcaccaacaaaatctatccctgctattgcacctagtgtcatctcaatatgtggctgacagcaaatgttctaacttaatctgatagatgctcctttagcatataaaagagcttgctaagtccctattacctgtagcagtctatcaactaaatatttaagaagtcatttcatagacaaggtttatgaatgacttagaagtaaaattagtaatttctaaaccactgtagtgttttctatgtttttagagatattccaaacacagagttttcaaaggagctgtaaaaccaagtacaaacatacgtaagtaattttgtcatggatatttctgtactaatttgggggagactggtgggccataaataaatgaaatacacatcctaaaaataatggtaaaaatgatcaagtaccactttcagatggttattcaagtatcaacttggtatgcaagtaagttcacccatgtcttcacctatgatttcatattcaaagcgctacatcttact

SEQ ID NO: 834 - DNA, 562 bp, Homo sapiens
cagattcagcccaggatcagcctgtgaagatgaactctttgccagcagagaggatccaggaaatacagaaggccattgagctgttctcagtgggtcagggacctgccaaaaccatggaggaggctagcaagcgaagctaccagttctgggatacgcagcccgtccccaagctgggcgaagtggtgaacacccatggccccgtggagcctgacaaggacaatatccgccaggagccctacaccctgccccagggcttcacctgggatgctttggacctgggcgatcgtggtgtgctaaaagaactgtacaccctcctgaatgagaactatgtggaagatgatgacaacatgttccgatttgattattccccggagtttcttttgtgggctctccggccacccggctggctcccccagtggcactgtggggttcgagtggtctcaagtcggaaattggttgggttcattagcgccatcccagcaaacatccatatctatgacacagagaagaagatggtagagatcaacttcctgtgtgtccacaagaagctgcgttccaagag

SEQ ID NO: 835 - DNA, 340 bp, Homo sapiens
ctaccgcctctgtwccctcttcattcacttccacaaatgacttgtggacaatyttwgatataawaatatctctggctcctgacatgccagacagatcagccttgctactgttaaagagatcctgcwcacctakgcgggcgaggtcggagttgagagtgtaactctcttccagtttgaacctgggcaagctgacattaacttcaatgaaatcgagattctsaggtttagtccactcatgcaacttttccaaagtcaactgttcctcaatcttcttcaggcccgtggactcgtcctcaatgtcatccggcarcaggatgaccatgctgagctcctcrccttg

SEQ ID NO: 836 - DNA, 490 bp, Homo sapiens
gtccagtgccaagagggccggcaagaagaagtgacaatgaagtcttttcttgcggacactccctcctgtctcctattttctgtaaataattttctccttttttctctcttgatgctcaccaccaccttttgcccccttctgttctgactttataagagacaggatttggattcttcagaaattacagaataattcatttttccttaaccagttgtgcaaggacagcaacaaccaatctaatgatgagaatgtacttatattttgttttgctattaacctacttacggggttagggacttgcggggggggcttgtgtgttttgttggcttgtttgccatgaaggtagatgtgggtggggagaagacacaaggcagtttgttctggctagatgagagggaacccaggaattgtgaggttagcaggaatatctttagggtgagtgagttttccttgagttgggcacccgttgtgagagtttcagaacctttgg

SEQ ID NO: 837 - DNA, 481 bp, Homo sapiens
cgaatcaggacaagggtggtttgagggactgtttaacaggtccccatggttcacgaccctgatatccaccattatgggccctctgatagtacttttattaatcctactcctcggaccctgcattctcaaccgcttggtccagtttgtaaaagacagaatttcggtggtgcaggccctggtcctgacccaacagtatcaccaactcaaatcaacagatccagaagaagtagaatcgcgtgaataaaagattttattcagtttccagaaagaggggggaatgaaagaccccaccataaggcttagcaagctagctgcagtaacgccattttgcaaggcatgaaaaagtaccagagctgagttctcaaaagtcacaaggaagtttagttaaagaataaggctgaacaaaactgggacaggggccaaacaggatatctgtggtcgagcacctgggccccggctcagggccaagaacagatggtac

SEQ ID NO: 838 - DNA, 526 bp, Homo sapiens
tgagcatgctaaatcaaattccatgaatacagttttcataagatgtctttactacatgcattttgctaatatttccctaaaatattcaccaactctacagagttatactttgtgttaaggtactattgagttataagggaaatagccgtatcaggtagctagtgacataataccagttgtgaaaattcagacaaaatgagtcgacaaatccccaaaaatggcaaattaagccctgtgacaaaataagttattggatcatacagaaatagcccaaatctggaaattttgaattaaaattgtaatcctgtaaaacaagttttggggtgaatggatttctttaataccaataatatttttaattcccaccacagatggatttgctgaatatgctaatgctgtgaatgagaaaacaattttggggtaggtatacccacaagtaatctgatgacaaaataaaccacagactgatgtcaaatggacaaaaaactgaaaatatgctgtgagaaatagacaaccaaaataatat

SEQ ID NO: 839 - DNA, 577 bp, Homo sapiens
cggcagcacctccttgattctcagttttgctggaggccgcaaccaggcccgcgccgccaccatgtttcgaaatcagtatgacaatgatgtcactgtttggagcccccaggattcatcaaattgaatatgcaatggaagctgttaaacaaggttcagccacagttggtctgaaatcaaaaactcatgcagttttggttgcattgaaaagggcgcaatcagagcttgcagctcatcagaaaaaaattctccatgttgacaaccatattggtatctcaattgcggggcttactgctgatgctagactgttatgtaattttatgcgtcaggagtgtttggattccagatttgtattcgatagaccactgcctgtgtctcgtcttgtatctctaattggaagcaagacccagataccaacacaacgatatggccggagaccatatggtgttggtctccttattgctggttatgatgatatgggccctcacattttccaaacctgtccatctgctaactattttgactgcagagccatgtccattggagcccgttcccaatcagctcgtacttacttggagag

SEQ ID NO: 840 - DNA, 284 bp, Homo sapiens
gtacaagcttttttttttttttttttttttttttkgggcgggatattgatttcacggaggatggtggtcaagggacccctatctgaggggggtcatccatggggacragaagggatttgactgtaatgtgctatgtacggtaaatggctttatgtactatgtgctgttaaggatgggtaggtttgttggtatcctartgggtgaggggtggctttggagttgcagttgatgtgtgatagttgagggttgattgctgtacttgcttgtaagcatggggagggggt

SEQ ID NO: 841 - DNA, 504 bp, Homo sapiens
cctgggtggtggagcgaatgggccgattccaccggatcctggagcctggtttgaacatcctcatccctgtgttagaccggatccgatatgtgcagagtctcaaggaaattgtcatcaacgtgcctgagcagtcggctgtgactctcgacaatgtaactctgcaaatcgatggagtcctttacctgcgcatcatggacccttacaaggcaagctacggtgtggaggaccctgagtatgccgtcacccagctagctcaaacaaccatgagatcagagctcggcaaactctctctggacaaagtcttccgggaacgggagtccctgaatgccagcattgtggatgccatcaaccaagctgctgactgctggggtatccgctgcctccgttatgagatcaaggatatccatgtgccaccccgggtgaaagagtctatgcagatgcaggtggaggcagagcggcggaaacgggccacagttctagagtctgaggggacccgagagtcgg

SEQ ID NO: 842 - DNA, 119 bp, Homo sapiens
ccaggagctaagcttgagtctcctttactgaatttcgttcttagtgcaggttacttgtagattctagtcttcacaggctccctggggctcttaactagtcacactgggagtcatgaatg

SEQ ID NO: 843 - DNA, 508 bp, Homo sapiens
ccaggctggtcttgaactcctgacgtcaagtgatctgcctgccttggtctcccaatacaggcatgaaccactgcacccacctacttagatatttcatgtgctatagacattagagagatttttcatttttccatgacatttttcctctctgcaaatggcttagctacttgtgtttttcccttttggggcaagacagactcattaaatattctgtacattttttctttatcaaggagatatatcagtgttgtctcatagaactgcctggattccatttatgttttttctgattccatcctgtgtccccttcatccttgactcctttggtatttcactgaatttcaaacatttgtcagagaagaaaaacgtgaggactcaggaaaaataaataaataaaagaayagccttttcccttagtattaacagaaatgtttstgtgtcattaaccatctttaatcaatgtgacatgttgctctttggctgaaattsttsaacttggaaatgacac

SEQ ID NO: 844 - DNA, 539 bp, Homo sapiens
  misc_feature 401: n = A,T,C or G
ccagcagttcctctttgccttatatttgtggtacgcccggccagccttcaagatgggtttgtcaattcggccacctccagccaccacaccaaccacagctctgttggctgaggagataaccttcttggagccggagggcagcttcacacgggtcttcttggtctcagggttgtgggagataacggtggcatagttccctgatgcccgggccagcttgccacggtctccaggcttctcctccaggcagcacacgattgtaccctcaggcatggtgcccacagggagcacattgccaatgttgagctgggccttcttgccgcaatacacaaactggcccgtgtgaatgccctcggcggcaatgaacagctccgtccgcttcttaaaccgatacggatcccggnagaccaccttggcgaggggcgcgccgcggcccgggkcgtggatgatgtccttgacgatgccccttgatgtagccgtgccgctcagcgaaatccacggcgcgcaggcgcgcagcgcctttacggtgcttcacgtgcgcg

SEQ ID NO: 845 - DNA, 491 bp, Homo sapiens
aaaatgtgttcttacatattttgacttcagctatattaaataggaaacagaaataactgtttagatctaattgatttttcttttctcttgtttttaagttttatataaatggttagcagagcaccaaatgactgcaattctatgatccattaaggtcatgtatacatacatgtttgtatatgaatatatatacaatatgtataggaccatatatatttacttgtttttgtctgtttattttcctaatagtaagggccagggccaggactttagatgacagtcgtgtgattgcaccagggtatataatgcatggatacacatggagacaagtcctggcacctggtgctccagaggtcagccatggcttattatgccttcgtttaccctagcacatgccaggataaacgtagaggaagaacagatcctccctgacctggtatgtgatccagggagactctactcaaaggtttagcattcgatgaaggagcctc

SEQ ID NO: 846 - DNA, 482 bp, Homo sapiens
gcgagaatgaagactattctcagcaatcagactgtcgacattccagaaaatgtcgacattactctgaagggacgcacagttatcgtgaagggccccagaggaaccctgcggagggacttcaatcacatcaatgtagaactcagccttcttggaaagaaaaaaaagaggctccgggttgacaaatggtggggtaacagaaaggaactggctaccgttcggactatttgtagtcatgtacagaacatgatcaagggtgttacactgggcttccgttacaagatgaggtctgtgtatgctcacttccccatcaacgttgttatccgggagaatgggtctcttgttgaaatccgaaatttcttgggtgaaaaatacatccgcagggttcggatgagaccaggtgttgcttgttcagtatctcaagcccagaaagatgaattaatccttgaaggaaatgacattgagcttgtttcaaattcagcggc

SEQ ID NO: 847 - DNA, 478 bp, Homo sapiens
gtggttcagtgcctcctcactgatgttgattccttccgtctgggcacggattttaatgatctgtttcatttcctgtggagtatacagcatggtccggattatcatcactcggtccagaaggtcaagagggatgccgtgaggggatgtgatgtcctcagtgcctctgatgacacagttgcctcggttggatgcaaagatgacgatgggagcgatagaagactccagggcgcggtgcaggtaggtgaagcactcaatgtccagcatgtggacctcatcaacaaacagcacacccgggaccagctcagcaatgccctggtcgatgtacttgttcaccaccttattaatctcccctcgaagtttgtctgtgatttctgtcttctttggcttcattagctggcccatcatggacaggatatcttgtcccccctggggccgcgcattagccacatccaagtcatgcaaggtcacatcttggatg

SEQ ID NO: 848 - DNA, 524 bp, Homo sapiens
cgccgagagccttagccgacggaaactggacactggaccggcagcgccatgagactcctcccccgcttgctgctgcttctcttactcgtgttccctgccactgtcttgttccgaggcggccccagaggctcgttagcagtggcacaagatcttacagaggatgaagaaacagtagaagattccataattgaggatgaagatgatgaagccgaggtagaagaagatgaacccacagatttggtagaagataaagaggaagaagatgtgtctggtgaacctgaagcttcaccgagtgcagatacaactatactgtttgtaaaaggagaagattttccagcaaataacattgtgaagttcctggtaggctttaccaacaagggtacagaagattttattgttgaatccttagatgcctcattccgttatcctcaggactaccagttttatatccagaatttcacagctcttcctctgaacactgtagtgccaccccagagacaggcaacttttgagtactctttcat

SEQ ID NO: 849 - DNA, 484 bp, Homo sapiens
ccaccaaacaattcgagcagctccaggcagccatacatacagaccttggggccttagaaaaatcagtcagtgccctagaaaagtctctgacctcgttgtctgaggtggtcctacagaaccggagaggattagatctgctgttcctaaaagaaggaggattatgtgctgccctaaaagaagaatgctgtttctatgcagaccacactggcgtagtaagggatagcatggctaagctaagagaaaggctaaaccagaggcaaaaattgttcgaatcaggacaagggtggtttgagagactgtttaacaggtccccatggttcacgaccctgatatccaccattatgggtcctctgatagtacttttattaatcctactcctcggaccctgcattctcaaccgcttggtccagtttgtaaaagacagaatttcggtggtgcaggccctggttctgacccaacagtatcaccaactcaaatcaataga

SEQ ID NO: 850 - DNA, 484 bp, Homo sapiens
aaagaatcagcaaaatttcaaataaaaaattatgaaaatattatcctcagtagttcatttagtcccatgaaattaattattttctctgcttgatcttggtggacagtttcatgaagctgtcagttagttcattaaagttttggaaattctcagacagtgcagtggtatcagaaacttgtattcaagagtacaggtcagagtcttcttttcttttctttttgagatggagtcttgctctgttgccagactggagtgcagtggtgcgatctgggctcactgcaatctccacctcccgggttcaagcgattctcctgcctcagcctcccgagtaactgggactacaggtgcgcgccaccaagcccagctcatttttgtatttttagtagagatggggtttcacgatgttggctaggatggtctcgatctctggtcagagtcttttctgtaaatatccttggtaaagaagcaattttagactgtagct

SEQ ID NO: 851 - DNA, 342 bp, Homo sapiens
aaaaaactgtttaacaggtccccatggttcacgaccctaatatccaccattatgggccctctaatagtacttttattaatcctactcctcggaccctgcattctcaaccgcttggtccagtttgtaaaaaacagaatttcggtggtgcaggccctagttctaacccaacagtatcaccaactcaaatcaataaatccagaaaaagtaaaatcgcgtaaataaaaaattttattcagtttccagaaagaggggggaatgaaagaccccaccataaggcttagcaagctagctgcagtaacgccattttgcaaggcatgaaaaagtaccagagctgagttctca

SEQ ID NO: 852 - DNA, 443 bp, Homo sapiens; identical to SEQ ID NO: 661

SEQ ID NO: 853 - DNA, 539 bp, Homo sapiens
ctggaacgtcagcccagcgagccgaactgatcgcactcacccaagccctgaaaatggcagaaggtaagaagctaaatgtttacactgatagccgctatgccttcgctacggcccatgttcatggggaaatatataggagacgggggttgctgacctcagaaggcaaggaaatcaagaacaaaagcgagatcctagccttgctgaaagccctctttttgccaaagagactcagtattatccattgcccaggacatcagaaaggagacagtgccgaagccagaggcaaccgtatggcagaccaggcggcccgagaggcagccacaaaaacagttccagaagcctctacactccttatagaggactcgaccccgtacacgcctgcctatctccattacaccgaaacagatctaaaaagattgcgagaactgggggccacctataatcagataaaaggatattgggtcctacaaggcaagccggtgatgcccgatcagtttgtgtttgaattattagactcccttcatagactcacccatctc

SEQ ID NO: 854 - DNA, 507 bp, Homo sapiens
  misc_feature 470, 473: n = A,T,C or G
ctaaacctcttgcagcccattggtcagtttggtaccaggctacatggtggcaaggattctgctagtccacgatacatctttacaatgctcagctctttggctcgattgttatttccaccaaaagatgatcacacgttgaagtttttatatgatgacaaccagcgtgttgagcctgaatggtacattcctattattcccatggtgctgataaatggtgctgaaggaatcggtactgggtggtcctgcaaaatccccaactttgatgtgcgtgaaattgtaaataacatcaggcgtttgatggatggagaagaacctttgccaatgcttccaagttacaagaacttcaagggtactattgaagaactggctccaaatcaatatgtgattagtggtgaagtagctattcttaattctacaaccattgaaatctcagagcttcccgtcagaacatggacccagacatacaaagnacnagttctagaacccatgttgaatggcaccgagaag

SEQ ID NO: 855 - DNA, 469 bp, Homo sapiens
ccaccattttgaagaccaccacagatctcaaggcatgagactactcaccaacaaaatctatccctgctattgcacctagtgtcatctcaatatgtggctgacagcaaatgttctaacttaatctgatagatgctcctttagcatataaaagagcttgctaagtccctattacctgtaacagtctatcaactaaatatttaagaagtcatttcatagacaaggtttatgaatgacttagaagtaaaattagtaatttctaaaccactgtagtgttttctatgtttttagagatattccaaacacagagttttcaaaggagctgtaaaaccaagtacaaacatacgtaagtaattttgtcatggatatttctgtactaatttgggggagactggtgggccataaataaatgaaatacacatcctaaaaataatggtaaaaatgatcaagtaccactttcagatggttattc

SEQ ID NO: 856 - DNA, 452 bp, Homo sapiens
ccattaaaagttatttacaacagtgggagaaaaaaagacaagaagttgtttcacattacagacctccccccaccccaaagcctaatacttgcttaccaagtcaaaaaagagacacagttgattcacaggctggaggtttgaacttgagtaagacatttataaaaacctagacggggcagtgtcctccccagcccaggtgccgctaggcacagcacaagagactaaaaacaacaggggaaggctggacactcaaggtttgggagtataagcaccccacttctggctcagggatttggggagtagggtaaacaaaacctacttggaaaagaattggggaagaaaaccaacaactgccttatgcaggggtggggacagggaaggaggtagggccagggacaggagcatttcacatcactaacctaacttgggaagctgtaagggaccatcttcaa

SEQ ID NO: 857 - DNA, 484 bp, Homo sapiens
ccacagaagttgctgctgacgctctgggcgaagaatggaagggttatgtggtccgaatcagtggtgggaacgacaaacaaggtttccccatgaagcagggtgtcttgacccatggccgtgtccgcctgctactgagtaaggggcattcctgttacagaccaaggagaactggagaaagaaagagaaaatcagttcgtggttgcattgtggatgcaaatctgagcgttctcaacttggttattgtaaaaaaaggagagaaggatattcctggactgactgatactacagtgcctcgccgcctgggccccaaaagagctagcagaatccgcaaacttttcaatctctctaaagaagatgatgtccgccagtatgttgtaagaaagcccttaaataaagaaggtaagaaacctaggaccaaagcacccaagattcagcgtcttgttactccacgtgtcctgcagcacaaacggcggcgtattgctct

SEQ ID NO: 858 - DNA, 460 bp, Homo sapiens; identical to SEQ ID NO: 456

SEQ ID NO: 859 - DNA, 474 bp, Homo sapiens
ctggagttcataaattcttgcagccttgtttccttgggggctgaagtctggcatattttcaaaccagtgcattcaagaatacagtaagatcccaaccagcagggtaggccgagaactgggctactctaaaccagtaattcctacaacattcaatcaacttggaatcatgttttcatgtaggtattatttttgaatcaacaggaagggaatgagctcagctctatttctcaagttttacgaaacactaataacaatatttaacatttactagggcttactatgtgccaagcactgtgctaaacactgaatcctcacaaaaccctaagtgctaagaaagctagggtaatttttttctgcattcaagactctacagctaatttggtcttttgctataaaaacttggtctcccactttttgttgaagcgaacaagaatcacaggaactcaccctcagcttcacgaaactcccagcttc

SEQ ID NO: 860 - DNA, 500 bp, Homo sapiens; identical to SEQ ID NO: 245

SEQ ID NO: 861 - DNA, 518 bp, Homo sapiens
ctgtcagcgtagcaccgaattcaagaccaaggcgtgctacctgagctgacagctttttgaaagccgagctgtttctgaaccatgtacatacatgttctgaaactttctcatcattttatgagtactgttcattgagagatgacaatgaagattagatgaaattggaaataaaccaacattgtttacattccaggagacttgtagctcagccacacacgcagtaatgacctgtgcccgttcgcctctggcactgcccacccctctttttttttttcttctaattctgtactcacaaaagagaatctcattttcttctttcttccattcccttaaattctgagtactgtacatatatttctgggttcccacgatgatgtgaaaaactaccagactgttttttgtcttctcacaaagacaagaaaaatcagggcattttgtgagtgccttaagatcaaactaacaagatctgaccctctcccctcacagtgagccactgccccacttcagagggtaagagc

SEQ ID NO: 862 - DNA, 409 bp, Homo sapiens
ctgagagaccaggagaagttccagatgcagagactgtgatgctcttgactatggaattattgcggccagtagccaagttagagacaaaacaggcataggtcccgttattatttggcgtgattttggcgataaagagaacttgtgtgtgttgctgcggtatcccattgatacgccaagaatactgcggggatgggttagaggccgagtggcaggagaggttgaggttcgctcccgaaaggtaagacgagtctgggggggaaatgatgggggtgtccggcccatagaggacatccagggtgactgggtcactgcggtttgcactcactgagttctggattccacatacataggctcttgcgtcatttcttgtgacattgaatagagtgagggtcctgttgccattggacag

SEQ ID NO: 863 - DNA, 485 bp, Homo sapiens
aaactaccgctgagaaatatagtttccaagttcagtgttattttcacagtatttaatgggtttactatataaaaacatcagttacacttcaggcttcataatatttttcaaatttccacttttgatatggtttcactgggtcacaggcagctactttcaggatcttttgagaaaaatttccttccaagcataataattgctgattgttttcaaaaacaatgtgattcaccagttctggatgaaagactgatgttgatttatgcagccattttagccctttgtttctgttatcacaagggtgcagccttacggctcctttatcagggatgggggctatacaccattctccacatttaataagtcttaaccaggtgtaattaaattgttgaagctctttgctcccatcgcggtcttccagaatgactgtagtgttttcaatggaawgcatttacccaaagccacattaataagcacaccactagctc

SEQ ID NO: 864 - DNA, 447 bp, Homo sapiens
ctgccgaacgacgtggtcctacagatcatggagctttgtggtgcaacaagacttggttattttggaagaagtcagttctacattgctttgaaacttgtagctgttgcccagtctggtttccctttaagagtggaaagtataaatacagtaaaggaccttcctctgccaagatttgttgcttcaaagaatgaacaggaatctcgccatgcagcctcatattcttcagattctgaaaatcaagggtcgtattctggtgtaattcccccaccacctggcagggggcaagtgaaaaagggatccgtaagccatgatacggttcagcctcgtacatctgcagatgcacaggaacctgcatccccagtagtttcaccacagcaatccccaccaacttctccacacacatggaggaagcacagccgtcatcccagcggtgggaatagtgagagg

SEQ ID NO: 865 - DNA, 522 bp, Homo sapiens
  misc_feature 501: n = A,T,C or G
aaaaaatcttgaacttttctgtaggtcagttttagaactgctgtgaaaagtgaaggttgccctgtggagattaaaattagagttgttttcataactgacagcatggtgaatccatttgagtcaaagtgaagaatttcctcatcaagtgactatacatttgtttttgtgtgctcaaaagaaatacctaatgtcacattgtcgttaaatactatggttttgcaatatgattgatggtaaaagagtgatgtcatattgatactagagtagcttgtttttttagtaggtgtgggaccatctcttttacaagtgcaactcagtctaggacagccatggatgcagtgtctggagttggaccctctgagcccgctggctgccccagtagcatctgcattggtgaccaaggacactgcactttgaagaggtcgccactgggttatttagtgtcttcactgcttttgttaaaaattgtaaaattttgtacacaaaaagttgtgtttttgnatatcaattgtttagacacac

SEQ ID NO: 866 - DNA, 527 bp, Homo sapiens
ctgtagtgtgttgcctcaaataataccaagttataaataataccaagtaattatcaactcactcccaaatttaataagatatcaaagtccaaaaggttacttaggagtagtcttccgtgggggaagataaatttattaaagagtcatgtactgatctttttcttgggattttttttcctttcccagaaaaaaaaattattttggtgactgatcaattgtaaacaattttcttccttacttacaaatcatccgttcagaaaaataaaagtggacttcctttcctaagcattacaattagcctgggcaagaggtgttatgattgtcttattctttaagccggcttactttttggatttgtgtgaaatgtcttttgaaaagaaagtagatagtatagtattaattaactactttgtatagtcttctgcataatttagagttgaaaataatgtaacattttcctgtgaacagattcctttatgcgtacatactttataaatatacatacatacacatacacatacattttt

SEQ ID NO: 867 - DNA, 606 bp, Homo sapiens
  misc_feature 536, 566: n = A,T,C or G
gtgctcgaccacagatatcctgtttggcccctgtcccagttttgttcagccttattctttaactaaacttctttgtgacttttgagaactcagctctggtactttttcatgccttgcaaaatggcgttactgcagctagcttgctaagccttatggtggggtctttcattcccccctctttctggaaactgaataaaatcttttattcacgcgattctacttcttctggatctattgatttgagttggtgatactgttgggtcagaaccagggcctgcaccaccgaaattctgtcttttacaaactggaccaagcggttgagaatgcagggtccgaggagtaggattaataaaagtactatcagagggcccataatggtggatatcagggtcgtgaaccatggggacctgttaaacagtccctcaaaccacccttgtcctgattcgaacaatttttgcctctggtttagcctttctcttagcttagccatgctatcccttactacgccagtgtggtctgcatagaaacagcattcntcttttagggcagcacataatcctccttcnttttaggaacagcagatctaatcctctccggttctgtagg

SEQ ID NO: 868 - DNA, 447 bp, Homo sapiens
ctggaacgtcagcccagcgagccgaactgatcgcactcacccaagccctgaaaatggcagaaggtaagaagctaaatgtttacactgatagccgctatgccttcgctacggcccatgttcatggggaaatatataggagacgggggttgctgacctcagaaggcaaggaaatcaagaacaaaagcgagatcctagccttgctgaaagccctctttttgccaaagagactcagtattatccattgcccaggacatcagaaaggagacagtgccgaagccagaggcaaccgtatggcagaccaggcggcccgagaggcagccacaaaaacagttccagaagcctctacactccttatagaggactcgaccccgtacacgcctgcctatctccattacaccgaaacagatctaaaaagattgcgagaactgggggccacctataatcaga

SEQ ID NO: 869 - DNA, 523 bp, Homo sapiens
ccacaaattcctttaaggcacgagctaaaatccaaaatgatggagtctgtttggtgatatttatgcagcgatcatcattaaatatatcttcaatactgcttgggatctgagttgtatttagtgctgtgttcacatttttaatagcttcttcaaaattctcttcatcttctggagccccattttcattttttagaattccttgtctaatcaaatctctgaagtcctctttttctttatacgttttaggtattcgtccatttgtttcactataccactgtgctaaatatttagctatgatcacaatccatggagtatgactgtggtcctttttttccatatgatccaaatcataggactgaaaatgttctctcagttcaggaaatggcttatctagtcgtagatcctctaatgcattatctggatgagattctattactggatgttcttttataatgatcctcatataaccaactagtccatatgtcctacagatcaaaagaggaatctgggaattccagaggac

SEQ ID NO: 870 - DNA, 507 bp, Homo sapiens
ccaccaaacaattcgagcagctccaggcagccatacatacagaccttggggccttagaaaaatcagtcagtgccctagaaaagtctctgacctcgttgtctgaggtggtcctacagaaccggagaggattagatctgctgttcctaaaagaaggaggattatgtgctgccctaaaagaagaatgctgtttctatgcagaccacactggcgtagtaagggatagcatggctaagctaagagaaaggctaaaccagaggcaaaaattgttcgaatcaggacaagggtggtttgagggactgtttaacaggtccccatggttcacgaccctgatatccaccattatgggccctctgatagtacttttattaatcctactcctcggaccctgcattctcaaccgcttggtccagtttgtaaaagacagaatttcggtggtgcaggccctggttctgacccaacagtatcaccaactcaaatcaatagatccagaagaagtagaatcgcgtg

SEQ ID NO: 871 - DNA, 482 bp, Homo sapiens
ccaccctggtgttggcatattggccccactgtaacttttgggggcttcccggtctagccacaccctcggatggaaagacttgactgcataaagatgtcagttctccctgagttgattgataggcttaatggtcaccctaaaaacacccacatatgcttttcgatggaaccagataagttgacgctaaagttcttatggaaaaatacacacgcaatagctaggaaaacacagggaaagaagagttctgagcaggacctagtcttagccaatattaaaacatactatgaagcctctgatacttaaacagcatggcgctggtacgtaaatagaccaatgcagttaggtggctctttccaagactctggggaaaaaagtagtaaaaagctaaatgcaatcaatcagcaattgaaagctaagtgagagagccagagggcctccttggtggtaaaagagggttgcatttcttgcagccagaaggcaga

SEQ ID NO: 872 - DNA, 72 bp, Homo sapiens
ctgccccccacccttcccttcgatgacaacgtttgcaggcttcagggggaccagggaacaaagctggggcct

SEQ ID NO: 873 - DNA, 408 bp, Homo sapiens
aaagagctatatattgatccatcaaaagtggacaatttgttgcagttggggtttactgcccaggaagcccggcttggcctgagggcgtgtgatgggaacgtggatcatgcggccactcatattaccaaccgcagagaggaactggcccaaataaggaaggaggaaaaagagaagaaaagacgccgcctcgagaacatcaggtttctgaaagggatgggctactccacgcacgcggcccagcagattctgctcagcaatcctcagatgtggtggttaaatgattccaatcctgaaaccgacaaccgtcaagaaagtccttcccaggaaaacattgaccgattggtgtacatgggttttgatgcactcgtggccgaagctgcgctgagagtgttcagaggcaacgtccag

SEQ ID NO: 874 - DNA, 532 bp, Homo sapiens
  misc_feature 444: n = A,T,C or G
aaaactttctctacttatttagttttctcctctgagttcaaccgctgctggattcgtttggcataactttgtgccatggagttaatgatagataggatgaagtaacacaccatgacaacgaccaacttttcaaacatccaggacaaccagttttctccctgtggtgtgcccatttcgcttttgtggtgaagcttctgccgttgagcctccaggtactcctgaaatggcttctgcagagatggacctatgccggggacagcactggaagcagggtacagtagcccaaagaaaaagacacatttgggaagaaaagcaggaaaaacgttaaagaaaatgtacttaccacctggactcaaaaggcagggattggataggaagaggaataaaatataaaaatcagagaactgctgaaattctgtgacccctttttagtttaaaaaaaanaaaaaaaaargaaaatttactccatctaacaaccccttaaaaaccaaaatctctcccaccaacatgtctgggagaaaccaagagctgt

SEQ ID NO: 875 - DNA, 545 bp, Homo sapiens
ttggacgagttggtggtaggatgcagtccagagcctcaagcagcgtggttccactggcattgccatccttacgggtgactttccatcccttgaaccaaggcatgttagcacttggctccagcatgttgtcaccattccaaccagaaattggcacaaatgctactgtgtcggggttgtagccaattttcttaatgtaagtgctgacttccttaacaatttcctcatatctcttctggctgtagggtggctcagtggaatccattttgttaacaccgacaattagttgtttcacacccagtgtgtaagccagaagggcatgctctcgggtctgcccattcttggagataccagcttcaaattcaccaacaccagcagcaacaatcaggacagcacagtcagcctgagatgtccctgtaatcatgtttttgataaagtctctgtgtcctggggcatcaatgatagtcacatagtacttgctggtctcaaatttccacaaggagatatcaatggtgataccacgttcacgctcagctttcagtttatcc

SEQ ID NO: 876 - DNA, 463 bp, Homo sapiens
cctgaggtgtgtgccactcagagacttcacctaactagagacaggcaaactgcaaaccatggtgagaaattgacgacttcacactatggacagcttttcccaagatgtcaaaacaagactcctcatcatgataaggctcttacccccttttaatttgtccttgcttatgcctgcctctttcgcttggcaggatgatgctgtcattagtatttcacaagaagtagcttcagagggtaacttaacagagtatcagatctatcttgtcaatcccaacgttttacataaaataagagatcctttagtgcacccagtgactgacattagcagcatctttaacacagccgtgtgttcaaatgtacagtggtccttttcagagttggacttctagactcacctgttctcactccctgttttaattcaacccagccatgcaatgccaaataatagaattgctccctaccag

SEQ ID NO: 877 - DNA, 479 bp, Homo sapiens
caagcttttttttttttttttttttttttttttgaggktgatcggggtttatcgattacagaacaggctcctytaragggatwtgaagcaccgccaggtcctttgagttttaagctgtggctcgtagtgttctggcragcagttttgttgatttaactgttgaggtttagggctaagcatagtggggtatctaatcccagtttgggtcttarctattgkgtgttcaratatgttaaagccactttcgtagcctattttgtgtcaactggagttttttacaactcaggtgagttttagctttattggggagggggtgatctaaaacactctttacgccggtttctattgacttgggttaatcgcgtgaccgcggkggctggcacgaaattgaccaaccctggggttagtatagcttarttaaactttcgtttattgctaaaggttaatcactgctgtttcccgtgggggtgtggctaggc

SEQ ID NO: 878 - DNA, 460 bp, Homo sapiens
ctgctcccaggatggtcgtgtgttcatttggacctgtgatgatgcctcaagcaatacgtggtcccctaaattgttgcacaagttcaacgatgtggtgtggcatgtgagctggtccatcacagccaacatcctggctgtctctggtggagacaataaggtgaccctgtggaaggagtcagttgatgggcagtgggtgtgcatcagtgatgtcaacaagggccagggctccgtatcagcatcagtgacagagggccagcagaacgagcagtgacaagacaggtggggcctggctccccacccgccagctccaggactgccccttcctgggccaactaaccagacaactgggaagagcccccaactccaacaggattattttcccaggaggagttacagatgcagccacagattgatcatctgccttaacgtgatcggagatgctttgtaatctactgtccag

SEQ ID NO: 879 - DNA, 555 bp, Homo sapiens
ctgtctgtccctcagagggcacctggaggcagcaaagattatcttatttattttattttgttttctgctatatttagagtggcaaaaaaatagagcagagggtttctgctgtctccagactgtctaccaaagagaaggcgacagatgcctcctgggtttggaagggggatgcactgtggatctgccatccattctgcagtctccagcagagcaggcagtcaggccccagcgtgcctccatcccagtgccccgatgaccatctggtcagccctcccaacctcccttccagggggcttaccagcaaagccatattcggctaggaatttggaattcacaacctttattaacccctggcaaaacttcccgtttgcatgtcaaatcacattgaagcctgaaaattagcttttcttactggtttttccaataagtaatagcaaagcccacttatcatacttaaactacagtaaagaaaagaggtggttctctgcagtgatcgtttagtgtggccctcaaacattaaatatcccgaggtctccttggtgggtggcaggattt

SEQ ID NO: 880 - DNA, 474 bp, Homo sapiens
aaaggcttaatggcaataatcaggggaggaagaagagtatgtttattttacataactgacggaaaaataaattcaacaaatagtaaatagaatttaatatggtctcatgcgccctgaaggaggtggtgcccgatttggaggggtaattgctatgtccaagtaatctcctatctggaacttctgcgactgcagggtcatggaatcatcagtcccctttctgccagacatggtgctgccaatctccttaactcgatagccaggtcttttaacatctgtaaaaacgattgcaaaattgaagtgagtgcccttctttctagcttctgggtagacttcttttactaagcttgtcagttctttcaaggttgcatccatccaagtgtagatctgcaactcgctggacggtacatttccccgggagaactcgtccattcggtggtggcggccgttattggtggtgaagacccgtagcaacag

SEQ ID NO: 881 - DNA, 586 bp, Homo sapiens
  misc_feature 569: n = A,T,C or G
ctggggccactgtcggcatcatgattggagtgctggttggggtcgctctgatatagcagccctggtgtagtttcttcatttcaggaagactgcatttgcaacagctacagtctaaaattgcttctttaccaaggatatttacagaaaagactctgaccagagatcgagaccatcctagccaacatcgtgaaaccccatctctactaaaaatacaaaaatgagctgggcttggtggcgcgcacctgtagtcccagttactcgggaggctgaggcaggagaatcgcttgaacccgggaggtggagattgcagtgagcccagatcgcaccactgcactccagtctggcaacagagcaagactccatctcaaaaagaaaagaaaagaagactctgacctgtactcttgaatacaagtttctgataccactgcactgtctgagaatttccaaaactttaatgaactaactgacagcttcatgaaactgtccaccaagatcaagcagagaaaataattaatttcatgggactaaatgaactaatgaggataatattttcataattttttatttgnaattttgctgattcttt

SEQ ID NO: 882 - DNA, 424 bp, Homo sapiens
ctgatatgaatgaatgctgtctgtgtggaacaagcgtcgcaatgaggactctctacaggacccgatatggcatccctggatctatttgtgatgactatatggcaactctttgctgtcctcattgtactctttgccaaatcaagagagatatcaacagaaggagagccatgcgtactttctaaaaactgatggtgaaaagctcttaccgaagcaacaaaattcagcagacacctcttcagcttgagttcttcaccatcttttgcaactgaaatatgattgatatgcttaagtacaactgatggcatgaaaaaaatcaaatttttgatttattataaatgaatgttgtccctgaacttagctaaatggtgcaacttagtttctccttgctttcatattatcgaatttcctggcttataaacttttt

SEQ ID NO: 883 - DNA, 439 bp, Homo sapiens
  misc_feature 429: n = A,T,C or G
cctcgatgtctaaatgagtatggtaaaggatggtgcctgctggggtctcgtagatacctcgggacttcattccaatgaagcggttctccacgatgtcaatacggcccacgccatgcttgcccgcgacttcgttcaggtacatgaagagctccaaggaggtctggtgggtggtgccatccttgacgttggtcaccttcacagggaccccttttttgaactcgatctcgagaatgtcaggggtgttgggggctttggctgggtcctgggtcttcgtgtagagacctggaggcgcttggttcttggggttctccaggattccagcctcgtagctgatgcgcatgaggttctcatccatgctccacgggttcttgggagtgaccgggatgggaatcccgtgttgctttgcgtactccatcaggtcattgcggnccttgaaccg

SEQ ID NO: 884 - DNA, 447 bp, Homo sapiens
aaattttctccagtccctgggagcaagttgcagtctttttttttccctcttgtgctcagtcgccctgttcttgaggtctcttttctctactccatggttctcaatttatttggggggaaataccttgagcagaatacaatgggaaaagagtctctacctctttctgttcgaagttcatttttatcccttcctgtctgaacaaaaactgtatggaatcaacaccaccgagctctgtgggaaaaaagaaaaacctgctcccttcgctctgctggaagctggagggtgctaggcccctgtgtagtagtgcatagaattctagcttttttcctcctttctctgtatattgggctcagagagtacactgtgtctctatgtgaatatggacagttagcatttaccaacatgtatctgtctactttctcttgtttaaaaaaaaaaaaaaaaaaa

SEQ ID NO: 885 - DNA, 158 bp, Homo sapiens
ctgctttctagatgtacctaaattcagtcagacattttggattaagaaacctaaagtcctgatacattacatactccaaggaaatatatcagggacagacaattggctgaaacactgatacttcaatgtgacacatttttatagaacatttctaccag

SEQ ID NO: 886 - DNA, 441 bp, Homo sapiens
ctgcaggaaatgctgagaaattagaaattgctaagagattggctcttagaatcaatgcccagaagaatttgggcatcgagtctcaggatgtgatgcagcaggccaccaatgcaattcttaggggtggcaccattctggctcccactgtttctgcaaaaaccattgcagaacaacttgctgaaaagatcaatgccaagctcaattatgtgccgttagagaaacaagaagaagagagacaggatggtggacagaatgaatcttttaagagatatgaagaagaattagagatcaatgacttcccacagactgctaggtggaaagttacctctaaggaagctctgcagagaatcagtgaatactctgaagccgcaattacaatcagaggaacctacttccctcctggcaaagaacccaaggaaggcgagcggaagatttacttgg

SEQ ID NO: 887 - DNA, 353 bp, Homo sapiens
ctggaagaattgcccggccgcagcgtcattgttggtgcaggttacattgctgtggagatggcagggatcctgtcagccctgggttctaagacatcactgatgatacggcatgataaggtacttagaagttttgattcaatgatcagcaccaactgcacggaggagctggagaacgctggcgtggaggtgctgaagttctcccaggtcaaggaggttaaaaagactttgtcgggcttggaagtcagcatggttactgcagttcccggtaggctaccagtcatgaccatgattccagatgttgactgcctgctctgggccattgggcgggtcccgaataccaaggacctgagttt

SEQ ID NO: 888 - DNA, 455 bp, Homo sapiens
ctgtggccctggatacggagatccctaatgagcttccatacaatgactactttgaatactttggaccagatttcaagctccacatcagtccttccaatatgactaaccagaacacgaatgagtacctggagaagatcaaacagcgactgtttgagaaccttagaatgctgccgcacgcacctggggtccaaatgcaggcgattcctgaggacgccatccctgaggagagtggcgatgaggacgaagacgaccctgacaagcgcatctcgatctgctcctctgacaaacgaattgcctgtgaggaagagttctccgattctgaagaggagggagaggggggccgcaagaactcttccaacttcaaaaaagccaagagagtcaaaacagaggatgaaaaagagaaagacccagaggagaagaaagaagtcaccgaagaggagaaaaccaaggaggag

SEQ ID NO: 889 - DNA, 471 bp, Homo sapiens
cggcctttcaaacggatgaactattcagatgctatcgtttggctaaaagaacatgatgtaaagaaagaagatggaactttctatgaatttggagaagatatcccagaagctcctgagagactgatgacagacaccattaatgaaccaatcttgctgtgtcgatttcctgtggagatcaagtccttctacatgcagcgatgtcctgaggattcccgtcttactgaatctgtcgacgtgttgatgcccaatgttggtgagattgtgggaggctcaatgcgtatctttgatagtgaagaaatactggcaggttataaaagggaagggattgaccccactccctattactggtatacggatcagagaaaatacggtacatgtccccatggaggatatggcttgggcttggaacgattcttaacgtggattctgaataggtatcacatccgagacgtgtgcttataccctcgattt

SEQ ID NO: 890 - DNA, 123 bp, Homo sapiens
aaatttgaaaaaggaatcgattttcatctgtatgccgtcaaggaaggaattcagttacagggcatctgtaacttaaatattgtaagaataactcatatggaagttcaagctatttttatacta

SEQ ID NO: 891 - DNA, 405 bp, Homo sapiens
ccaccaaacaattcgagcagctccaggcagccatacatacagaccttggggccttagaaaaatcagtcagtgccctagaaaagtctctgacctcgttgtctgaggtggtcctacagaaccggagaggattagatctgctgttcctaaaagaaggaggattatgtgctgccctaaaagaagaatgctgtttctatgcagaccacactggcgtagtaagggatagcatggctaagctaagagaaaggctaaaccagaggcaaaaattgttcgaatcaggacaagggtggtttgagggactgtttaacaggtccccatggttcacgaccctgatatccaccattatgggccctctgatagtacttttattaatcctactcctcggaccctgcattctcaaccgcttgg

SEQ ID NO: 892 - DNA, 483 bp, Homo sapiens
ccagagcttaaccaggacacagtaatcggtggtgaggttgagtacagtggtagataggcagggagtgagcccggtgttgcaagcccagatggtcctggcgggagcagccagatagtaggacccgttgctcgccttctgggtggtattacacagggcctgatgggttttgggaactgctcctacgcagagttcctgcccggttacttcggacagggtcagcttgtgttgggaggccacggagcagttagctggggcagaggtatggttggagtaggtacctaggacggcaaccccttcgtagtaggggggtcccgataccagacacagccagcacttttgggttctgtcgggactggcgaggttgagtgcttgataggcttcttttactaggtttagcagcctgtcccccgtcccaggttgttgagaaggcgggggagccccaggtaccatagaggccgtgtctgaaggagggggatgaggagg

SEQ ID NO: 893 - DNA, 495 bp, Homo sapiens
ggcggacatcactttagaccctccacctaattgcagtgctggtcccaaaggcgataacatctatgaatggagatcaaccattctagggcctccaggatccgtgtatgagggtggtgtattctttctcgatatcacttttacaccagaatatcccttcaagcctccaaaggttacatttcggacaagaatctatcattgtaatattaacagtcaaggtgttatttgcttggacatattgaaagataattggagtccagcactaaccatttctaaagtcctcctttctatctgctcacttcttacagactgtaatcctgccgaccccttggtgggaagtattgccactcagtatatgaccaacagagcagaacatgacagaatggccagacagtggaccaagagatacgctacataaattggggtttcacaattcttacattatttgtctgtcacagaagagagctgcttatgattttgaaggggtcagggagggtg

SEQ ID NO: 894 - DNA, 433 bp, Homo sapiens
aaaatccctcaaaaactgtttattatacaagtgagttttgagtcacgatgggcttatcggtaggatttctggtagcgagcgcgggcaccagggcctccaaactttttggactcgcagcgacgagggtcagctaccagcagggtccggtcatactggatgaggatgtctttgatctccttcttggaagcctcatccacatatttctggtaataggccaccagggctttggagatggactgacggatagcataaatctgggccacgtgaccaccaccctttacacggacacggatgtctacaccagcaaatcgctccttgccgagaagcagaactggctccagcagcttgtactgtagcgtgcgcggctcaatcatctccaggggccgcccgttcaccttgatgagaccattgccgcgtttgcagtgcgccacag

SEQ ID NO: 895 - DNA, 476 bp, Homo sapiens
  misc_feature 444, 463: n = A,T,C or G
ccagaactattccagcccccgacacagggctgctccctgttcctgccagcttaaggaaatgccactcacacaatggggatgtctttctccctagaggtctctccatctgaccccatcctgagaagtggtctccctgagtgcggtgtaagagagccctttcccctgtcacaggggcccgggaagcccaaggatggagggacccatgcctgctgctccttggggctgttacatcatctgacctggttctcctttccaatgggccacccatgtcagcaagccccaggactgactcgctccaagctccccctcctgggaatggaagcacgatgggacaaagctccttgcagaggctgataaaccttagatcacacaggtttagatgctctgatcagtagaggttctctccctctgcttaagtaatatgaatttgcaaaaaccgcttcnaagtaaacaattaaattgnaatggtgatgggt

SEQ ID NO: 896 - DNA, 429 bp, Homo sapiens
agctaacgctacctccctcctggggacgatggcagacaccttccctaaactatattttgacttgtgtgatttagttggagaccattgggatgacccagaacccgatattggagatggttgccgctctccggggggaagaaaaaggacaagactgtatgacttctatgtttgccccggtcatattgtaccaatagggtgtggagggccgggagagggctactgtggcaaatggggatgtgagaccactggacaggcatactggaagccatcatcatcatgggacctaatttcccttaagcgaggaaacactcctaaggatcagggcccctgttatgattcctcggtctccagtggcgtccagggtgccacaccggggggtcgatgcaaccccctagtcttagaattcactgacgcgggtaaaaaggccag

SEQ ID NO: 897 - DNA, 434 bp, Homo sapiens
ctgaaccctcgtggagccattcatacaggtccctaattaaggaacaagtgattatgctacctttgcacggttagggtaccgcggccgttaaacatgtgtcactgggcaggcggtgcctctaatactggtgatgctagaggtgatgtttttggtaaacaggcggggtaagatttgccgagttccttttactttttttaacctttccttatgagcatgcctgtgttgggttgacagtgagggtaataatgacttgttggttgattgtagatattgggctgttaattgtcagttcagtgttttaatctgacgcaggcttatgcggaggagaatgttttcatgttacttatactaacattagttcttctatagggtgatagattggtccaattgggtgtgaggagttcagttatatgtttgggattttttaggtagtg

SEQ ID NO: 898 - DNA, 151 bp, Homo sapiens
ccaaataacagattaggtaaaatgagattacatgaaaaggttctaaaatgatatatttagatgcaataattaaccatatgctagaatgcccacctctaagccaattggattctttagctctctttttctttccttcatctaccttcttctc

SEQ ID NO: 899 - DNA, 495 bp, Homo sapiens
ttccctgactttgtaacagagggagccagggacctcatttcaagactgttgaagcataatcccagccagaggccaatgctcagagaagtacttgaacacccctggatcacagcaaattcatcaaaaccatcaaattgccaaaacaaagaatcagctagcaaacagtcttaggaatcgcgcagggggagaaatccttgagccagggctgccatataacctgacaggaacatgctactgaagtttattttaccattgactgctgccctcaatctagaacgctacacaagaaatatttgttttactcagcaggtgtgccttaacctccctattcagaaagctccacatcaataaacatgacactctgaagtgaaagtagccacgagaattgtgctacttatactggttcataatctggaggcaaggttcgactgcagccgccccgtcagcctgtgctaggcatggtgtcttcacaggaggcaaatccagagcctggct

SEQ ID NO: 900 - DNA, 437 bp, Homo sapiens
ctggcctttttacccgcgtcagtgaattctaagactagggggttgcatcgactccccggtgtggcaccctggacgccactggagaccgaggaatcataacaggggccctgatccttaggagtgtttcctcgcttaagggaaattaggtcccatgatgatgatggcttccagtatgcctgtccagtggtctcacatccccatttgccacagtagccctctcccggccctccacaccctattggtacagtatgaccggggcaaacatagaagtcatacagtcttgtcctttttcttccccccggagagcggcaaccatctccaatatcgggttctgggtcatcccaatggtctccaactaaatcacacaagtcaaaatatagtttagggaaggtgtctgtcatcgtccccaggagggaggtagcgttagctgtttgtcc

SEQ ID NO: 901 - DNA, 483 bp, Homo sapiens; identical to SEQ ID NO: 286

SEQ ID NO: 902 - DNA, 490 bp, Homo sapiens
ctgcaccacaagccgaggcaaggtagccctgggcagccttttccatggcctggatgtggtattccttcagccaacctccttgacgttactgtaccctctggcctccccgtccaacagcactgacgtctatttggagcccatggagattgctacctttcgcctccgcttgggttagggcttcttgtggcctgaagagaaagttcattcacagagactgcctcttaacatgaagatcattgggcaagccacacgggtatcccatcccgatctgcctcccagaactgtgacacactgggctctgccctcattttctgtttattgctgctgctgtgttttcggcgcaacccacaaacccagtgatgggtaaatagggcagacgccagtgagatcagggagagaaggcccttggtcagagtgggcagtgccaggctctgctttgggttgtgagttgacacccaactgggcacaggctcaggcacccatccttttt

SEQ ID NO: 903 - DNA, 464 bp, Homo sapiens
cctgacattcctgccttcttatattaataagaaaaataaaacaaaatagtgttgaagtgttggggcggcaaaaatttttggggggtggtatggagagagaatgggcgatgtttctcagggctgtttcaagcgggattaggggcggcgtgggaacctagagtgggagagattaagctgaagggaggtcttgtggtaaggggtgatattgtggggatgttagaagaaacatttgtcgtatagaatgatgattggtgatggcctggatacggttttggatgaattgagaaactaaatggaataagagaaagagaaaaacaggtataaaaggtctaagaattgggacgactcaggatatctgattagagagtgcctaaggagattcagcatagtcctgccagcaaagattatttatttacttcaagagtttagagtagcagtttggggatagcaccaggagatatcag

SEQ ID NO: 904 - DNA, 445 bp, Homo sapiens
ctggcagctcaccctgctctctgcagaccacgtgaagggaaaggagctgcctgtgttcctcccgggctgccggggtgggcactggtcagcaactccttctcggtttcaggttgtggagcgatggggagagaagtgcatgcagttgtgcagacaaggaggcgggtcctccctcctctttcagggtctctgaaacccccacagggcatataatgcccagcaaggtcccacttgcaggcacatgcctacaaagcagcagccatcttttgctttggctgatggggaatcaagattctgagagtgactgctcttttcttgacacaaagcagccacagaacactttcctacatacagtatggcagcaggcaagcagaaggccctgctggctcggattaaggcacttgaaagagacacaaggtacatcctcctcccctgcagcccccacagg

SEQ ID NO: 905 - DNA, 519 bp, Homo sapiens
  misc_feature 490: n = A,T,C or G
ccaccaaacaattcgagcagctccaggcagccatacatacagaccttggggccttagaaaaatcagtcagtgccctagaaaagtctctgacctcgttgtctgaggtggtcctacagaaccggagaggattagatctgctgttcctaaaagaaggaggattatgtgctgccctaaaagaagaatgctgtttctatgcagaccacactggcgtagtaagggatagcatggctaagctaagagaaaggctaaaccagaggcaaaaattgttcgaatcaggacaagggtggtttgagggactgtttaacaggtccccatggttcacgaccctgatatccaccattatgggccctctgatagtacttttattaatcctactcctcggaccctgcattctcaaccgcttggtccagtttgtaaaagacagaatttcggtggtgcaggccctggttctgacccaacagtatcaccaactcaaatcaatagatccagnagaagtagaatcgcgtgaataaaagattt

SEQ ID NO: 906 - DNA, 464 bp, Homo sapiens
cccgcccccagcgggagctgtggggcagaggcgctgctgtggttggtcagtccagtaagaagccagcagggctggtgctggggcttcttctcctgaaggggctgcaagagggaaggcttagccatgtcgtccttgatcagaagggtgatcagcaccgcgaaagccccaggggccattggaccctacagtcaagctgtattagtcgacaggaccatttacatttcaggacagataggcatggacccttcaagtggacagcttgtgtcaggaggggtagcagaagaagctaaacaagctcttaaaaacatgggtgaaattctgaaagctgcaggctgtgacttcactaacgtggtgaaaacaactgttcttctggctgacataaatgacttcaatactgtcaatgaaatctacaaacagtatttcaagagtaattttcctgctagagctgcttaccaagttgctgc

SEQ ID NO: 907 - DNA, 503 bp, Homo sapiens; identical to SEQ ID NO: 702

SEQ ID NO: 908 - DNA, 483 bp, Homo sapiens
ttggtgcacaaaatactgtcatttgctcaaagctggctgccaaatgtttggtgatgaaggcagaaatgaatggctcaaaacttgggagaagagcaaaacctgaaggggccctccagaacaatgatgggctttatgatcctgactgcgatgagagcgggctctttaaggccaagcagtgcaacggcacctccatgtgctggtgtgtgaacactgctggggtcagaagaacagacaaggacactgaaataacctgctctgagcgagtgagaacctactggatcatcattgaactaaaacacaaagcaagagaaaaaccttatgatagtaaaagtttgcggactgcacttcagaaggagatcacaacgcgttatcaactggatccaaaatttatcacgagtattttgtatgagaataatgttatcactattgatctggttcaaaattcttctcaaaaaactcagaatgatgtggacatagctgatg

SEQ ID NO: 909 - DNA, 443 bp, Homo sapiens
ctggcctggagcggtaccgagccatcacctcggcgtactatcgtggtgcagtgggggccctcctggtgtttgacctaaccaagcaccagacctatgctgtggtggagcgatggctgaaggagctctatgaccatgctgaagccacgatcgtcgtcatgctcgtgggtaacaaaagtgacctcagccaggcccgggaagtgcccactgaggaggcccgaatgttcgctgaaaacaatggactgctcttcctggagacctcagccctggactctaccaatgttgagctagcctttgagactgtcctgaaagaaatctttgcgaaggtgtccaagcagagacagaacagcatccggaccaatgccattactctgggcagtgcccaggctggacaggagcctggccctggggagaagagggcctgttgcatcagcctctgaccttgg

SEQ ID NO: 910 - DNA, 519 bp, Homo sapiens
cctctggcttctgctatgtcaacgacattgtgattggcatcctggagctgctcaagtaccaccctcgggtgctctacattgacattgacatccaccatggtgacggggttcaagaagctttctacctcactgaccgggtcatgacggtgtccttccacaaatacggaaattacttcttccctggcacaggtgacatgtatgaagtcggggcagagagtggccgctactactgtctgaacgtgcccctgcgggatggcattgatgaccagagttacaagcaccttttccagccggttatcaaccaggtagtggacttctaccaacccacgtgcattgtgctccagtgtggagctgactctctgggctgtgatcgattgggctgctttaacctcagcatccgagggcatggggaatgcgttgaatatgtcaagagcttcaatatccctctactcgtgctgggtggtggtggttatactgtccgaaatgttgcccgctgctggacatatgagacatcgctgc

SEQ ID NO: 911 - DNA, 534 bp, Homo sapiens
  misc_feature 516, 524: n = A,T,C or G
ctgattactgtcattactagagcttttacaaatgttgttctggtcagctttaatcctttttgctaagaagaagaatgcaaataatatattttcatatttaagatacacaaaaccatatttaatttccaggttatcttgaacaagggaaggaaagatgttaaagctttgttttcatggcctgtgtgaagctgttacaggatgtttgttgccagaaaaggctggatggttttaagaagatgggtctttctcttccctcttatgcttcaattttattttgtaccccacagcttctcttgaacagcctcttctgatgtttctaggtagtaggaaccttacaaatacatttatatatatgttgctgttggaatctatctaaatgccactcatttggtcctgcgcataatgtaagatgtaaacattccaagtcttctattattatactttagtattggaaatggattacgtgtggactattgagattaaggtgactcctttctcttagtgggctactatttnagactttngttttttata

SEQ ID NO: 912 - DNA, 428 bp, Homo sapiens
aaaacagggatccatcagaggtggtgaactatcaaggtcaaggttctagagcatggcacagatgaaaggtaatactcaccagcacctcacatgggactcagtgacaatgtcagcaacacaccatggaaggagaacaaacccgatgtaaaaggcacctagctggggagaagctgtggtgttcactgcctctctagcaggtttgcttttgtgcactgtggctaagtctggatgaataatattgggaagggaataatcggaagcgaggctcctatgcaggcagctaccctctcctgattggtgtatactcgccatgtggtaggaggtcttacaggagactgaggttaccaaacaggaatacaacacctctctcccttttctgctctagaaggaaggggaacccttccctcagtatcaatttcagcagcggc

SEQ ID NO: 913 - DNA, 537 bp, Homo sapiens
ctgtagacttgacctcaaagattccatcctcaatagtgaggattgacacatcaaaagtgccacctcccaggtcaaagatgagcacgtttctttctgctccaacctttttgtctaagccgtaagcaatagcagcagcagttggctcattaataattctaagtacattgagaccagcaatagttccagcatctttggtagcctgacgctgagagtcattaaagtaagctggcactgtgaccacagcattggtaacagtcttcccaaggtaggcttctgcaatttccttcatctttgtcagaaccatagaagacacctcctctggatagaagcttttggtctctcccttgtattctacttggaccttgggcctgccagcatcattcaccaccataaagggccaatgtttcatatcagactggacaacagcatcatcaaatyytgcgtccaatcagacgtttggcatcaaaaactgtgttggtgggggttcattgcaacttgattctttgcggcatcaccgatcaaccgttcagtgtccgt

SEQ ID NO: 914 - DNA, 463 bp, Homo sapiens
aaatgttttaggcaacctaagaacaaatgtaaaagtaaagatgcaggaaaaatgaattgcttggtattcattacttcatgtatatcaagcacagcagtaaaacaaaaacccatgtatttaactttttttaggatttttgcttttgtgattttttttttttgatacttgcctaacatgcatgtgctgtaaaaatagttaacagggaaataacttgagatgatggctagctttgtttaatgtcttatgaaattttcatgaacaatccaagcataattgttaagaacacgtgtattaaattcatgtaagtggaataaaagttttatgaatggacttttcaactactttctctacagcttttcatgtaaattagtcttggttctgaaacttctctaaaggaaattgtacattttttgaaatttattccttattccctcttggcagctaatgggctcttaccaagttt

SEQ ID NO: 915 - DNA, 606 bp, Homo sapiens
  misc_feature 579, 603: n = A,T,C or G
ttttttttttttttttttttttttattttatttcaaatttattttatgccaratccaagctgtaactggaacctattcccagtctatgggtttctgaatttcattttcctatttattgtatttttatgagaaacttgttgtaatgagtctgtaccactttatttgacatttactaaagctgtataaaagccatgcacagtttatttacagtattgtacattaaatgataatgtttgaagatcacacaaagatttcacaaaactataactaatacagaaagatgtgtgaaaacattaggggctttcaaaattttaggtatggaattttgcaaagattattttggcttataagtgttaggcaatcactaacctgaaataagtgacaaaaacatgcagatgattaccatttcaacaaatgaaaagctataaatgtctagctaaaagctaaaatattgkgtagctgaaatactaccatataacaatgggaatttataaaacaggaaaaaaggttattctttaaaagtcttccatgagtaataractttcagtaattttctataaaaacattcaraaattaagntttctcaaattatgtttatcaccnaaa

SEQ ID NO: 916 - DNA, 542 bp, Homo sapiens; identical to SEQ ID NO: 400

SEQ ID NO: 917 - DNA, 485 bp, Homo sapiens
attgggttatggcagggggttttatattgataattgttgtgatgaaattgatggcccctaagatagaggagacacctgctaggtgtaaggagaagatggttaggtctacggaggctccagggtgggagtagttccctgctaagggagggtagactgttcaacctgttcctgctccggcctccactatagcagatgcgagcaggagtaggagagagggaggtaagagtcagaagcttatgttgtttatgcggggaaacgccatatcgggggcaccgattattaggggaactagtcagttgccaaagcctccgattatgatgggtattactatgaagaagattattacaaatgcatgggctgtgacgataacgttgtagatgtggtcgttacctaraaggttgcctggctggcccagctcggctcgaataaggaggcttagagctgtgcctaggactccagctcatgcgccgaataataggtatagt

SEQ ID NO: 918 - DNA, 287 bp, Homo sapiens
ctgggctgccgccctgctcctcgctctgggcgtggaaagggctctggcgctacccgagatatgcacccaatgtccagggagcgtgcaaaatttgtcaaaagtggccttttattgtaaaacgacacgagagctaatgctgcatgcccgttgctgcctgaatcagaagggcaccatcttggggctggatctccagaactgttctctggaggaccctggtccaaactttcatcaggcacataccactgtcatcatagacctgcaagcaaaccccctcaaaggtgacttgg

SEQ ID NO: 919 - DNA, 465 bp, Homo sapiens
cctgtggcacggagcacctcccatggccgcagtgagcttggcctacagtgaagccatatttgaattgaagagatgcctactcgaaaacatcaggaacggcttgtcgaaccaaaacaaaaacatccagcagctcattgagctggtgagacggctgtgagtgtgcagagaaacccagttcaggtgtaggaggctgctgtgggcagccctgtctgatggggcacccgtgtggggctgtgctctggtgcctgagaatggctggtgcccaatcgacatgagaagacgaggaaaagacagggtttggagtctcctcaacagtgttaaaagaggaagtgacctcacagaccagctcagagatgttaccaagaatatcacagcccccagggtagggagacgagcagcagtttgttctgtctcagctcctgtcaaggatcctgcggggtgggccctctgtatagctgctctctg

SEQ ID NO: 920 - DNA, 457 bp, Homo sapiens
tttccccgagactcccggcacctcttcagcgcaaagattatttaatgtaatggcaactccacgggggaggacaaagaaaaaagcatcttttgatcattctccggatagccttcctttgaggagctccggtaggcaggcgaaaaagaaagcaacagagactttatcaaaaacatgattacagggacatctcaggctgactgtgctgtcctgattgttgctgctggtgttggtgaatttgaagctggtatctccaagaatgggcagacccgagagcatgcccttctggcttacacactgggtgtgaaacaactaattgtcggtgttaacaaaatggattccactgagccaccctacagccagaagagatatgaggaaattgttaaggaagtcagcacttacattaagaaaattggctacaaccccgacacagtagcatttgtgccaatttctggttgga

SEQ ID NO: 921 - DNA, 450 bp, Homo sapiens
aaaaaaacccaaaaattaatggctcaagatactacattgctaaagttaggggaaaaaagtaaaaaggctgtgagttctgttgcaagagctcatttgtagacttgcaaaatctaactaattttatattatgcttgttgttagagcagtgctcaaaattacagaagcttcaaattgttatgttttcacaaaatttgctacatatgttgacatgaatgtgtgtcagggaattcatacccaggtaaatgacaattacatcagtatagctaatttttgccaccttgggaggaatggaattctgcctattttcgaattaatcctacagcactcactaaaaactaacagccatggcaccataatacattttgtgaggtacctagaatattactaatggaaacaaaaaatgtgaggtaaaccgacctttccccaagaaactttgaagccagagatttt

SEQ ID NO: 922 - DNA, 469 bp, Homo sapiens
gtgcgagatagtagtagggtcgtggtgctggagtttaagttgagtagtaggaatgcggtagtagttaggataatataaatagttaaattaagaatggttatgttagggttgtacggtagaactgctattattcatcctatgtgggtaattgaggagtatgctaagattttgcgtagctgggtttggtttaatccacctcaactgcctgctatgatggataagattgagagagtgaggagaaggcttacgtttagtgagggagagatttggtatatgattgagatgggggctagtttttgtcatgtgagaagaagcaggccggatgtcagaggggtgccttgggtaacctctgggactcagaagtgaaagggggctattcctagttttattgctatagccattatgattattaatgatgagtattgattggtagtattggttatggttcattgtccggagagtatattgt

SEQ ID NO: 923 - DNA, 441 bp, Homo sapiens
ctgtctcttacttttaaccagtgaaattgacctgcccgtgaagaggcgggcatgacacagcaagacgagaagaccctatggagctttaatttattaatgcaaacagtacctaacaaacccacaggtcctaaactaccaaacctgcattaaaaatttcggttggggcgacctcggagcagaacccaacctccgagcagtacatgctaagacttcaccagtcaaagcgaactactatactcaattgatccaataacttgaccaacggaacaagttaccctagggataacagcgcaatcctattctagagtccatatcaacaatagggtttacgacctcgatgttggatcaggacatcccgatggtgcagccgctattaaaggttcgtttgttcaacgattaaagtcctacgtgatctgagttcagaccggagtaatccaggtc

SEQ ID NO: 924 - DNA, 503 bp, Homo sapiens; identical to SEQ ID NO: 702

SEQ ID NO: 925 - DNA, 447 bp, Homo sapiens
aagcttttttttttttttttttttttttttttgggkgaagtttattctgttttcacatctaggttgttggggagagtgatagacaaagttctggattctgggcatcgtcggcgcatgcttgtaatcctacttgggaggttgagacaggaggatcacttgaggctaggagttggaggctgcagtgtactatgttcgcatctgtgaatagccactgcactctagcctggacaatatagtgagaacccatctcaaaaaaaaaaaaaaaaggcaaagttctaratcctaactggaaragttaggccaaraaggaaraaaaggttctgggagctgctggctactcctmatcctcctcactatcgaratacttgkgggtggcgtagcccatcagggcaccaatattacctatgacracsctgctgccaccagccccgaggctytgcagcgtgg

SEQ ID NO: 926 - DNA, 454 bp, Homo sapiens
ccaattgaaacaaacagttctgagaccgttcttccaccactgattaagagtggggtggcaggtattagggataatattcatttagccttctgagctttctgggcagacttggtgaccttgccagctccagcagccttcttgtccactgctttgatgacacccaccgcaactgtctgtctcatatcacgaacagcaaagcgacccaaaggtggatagtctgagaagctctcaacacacatgggcttgccaggaaccatatcaacaatggcagcatcaccagacttcaagaatttagggccatcttccagctttttaccagaacggcgatcaatcttttccttcagctcagcaaacttgcatgcaatgtgagccgtgtggcaatccaatacaggggcatagccggcgcttatttggcctggatggttcaggataatcacctgagcagtgaagccag

SEQ ID NO: 927 - DNA, 573 bp, Homo sapiens
ctggtttgtgtttagaagaggtaatgagacaactaaatatttttcaatctaaaattcattctttaaggaccctctgaagaccacataaatacatgtatggggtgtgtgtgtgtgtatctatgtgtgtgtgtatatcttgatttctacttaattggctcttctatagtcatattaatatggggcaatgaaaaaacaacttcaataggatgagggaaggaatcctttggcaggctacaatctactctgaggtggagtagtggagggataaagggagagattacacttgtgtctctagggcaaagaaaatgcgaaacagaactgagtaaaagtaggacatgcagaactgtaacacagaaggtaaagaaaccagcagaagtatcacccagccaaatttcatagagcagtggggaaatatctgacatttagagagacaacccctgtaaacaggaatcgatcccacaagactttgctttggggaaaaagctaccttccttccctcattaaaaacactccattggtgatggcagcagtgcaggtggcagccaaaaggaggtacaggacacatttggagat

SEQ ID NO: 928 - DNA, 575 bp, Homo sapiens
ctgctcctgtttgttgccagaccctgggcctgtgcccctgcagcatggagtgaggaaagaacttgtctgcttgactagaggtcctagcagggtttgggactgtagcctgcctctgatttattccaggatcaacttcactgtctccagctccagagcctcagtcatgggacacacactcctgcccccatagttaaggtgaggggcccacatgtaagtgcttctgtggagtccaaaggtcaactctggagtaggacagatggctaattacctggagaaaggcccagcaacccctagtccatacaactcatctgaagcactactgccacccagtgggcacagtgggacttgccactcccccagagtttgccaaggtcaggcatctctacagaagctgggcctgaatcctactaccaacatacgcagccctgccaatgccccttcctcccttcttccacagacctcccccagagacaaatagcactaccacgagctgagtctgtcagagacccaaggaaggagtcagtgctagactacatcagggaagtctctcttctcagttaaagaccacaaccagc

SEQ ID NO: 929 - DNA, 498 bp, Homo sapiens
  misc_feature 471: n = A,T,C or G
cgccgagtgacagagacgctcaggctgtgttctcaggatgaccgagtgggagacagcagcaccagcggtggcagagaccccagacatcaagctctttgggaagtggagcaccgatgatgtgcagatcaatgacatttccctgcaggattacattgcagtgaaggagaagtatgccaagtacctgcctcacagtgcagggcggtatgccgccaaacgcttccgcaaagctcagtgtcccattgtggagcgcctcactaactccatgatgatgcacggccgcaacaacggcaagaagctcatgactgtgcgcatcgtcaagcatgccttcgagatcatacacctgctcacaggcgagaaccctctgcaggtcctggtgaacgccatcatcaacagtggtccccgggaggactccacacgcattgggcgcgccgggactgtgagacgacaggctgtggatgtgtccccctgcgncgtgtgaaccaggccatctggctgctg

SEQ ID NO: 930 - DNA, 502 bp, Homo sapiens
ccagtttgttctaggatgcattgcatcagacatcacagtacatgaagaaaatctgctttttgtgaaaagccaccaggcattttagatcccgtttaccatgaagtgcagacacagcagatacccagataatacagtcagtgcaaaagtcaaatgagtaagtcagctctttgatgaggctggctacactgcaaaatataaatgaaactcgaaaatagaaggtaaggtctatttacaaaagtttgtttagtaaagtgacttgaaaaaagttgttaaccacttcccaggcatccctcccctctcccaccaaaacaaacaaacaaaaaacaacaacaacaaaaaccctgaaaattatcttgaaagtcaagttaaaactatgtggtgaaaaagagagtgcttgttccaggtaaaggacttcaagataatttacaggcagatttatttttattagtaaaagtcacaaataggaaaagacttattggctgactttgagctgtgtgctttt

SEQ ID NO: 931 - DNA, 468 bp, Homo sapiens
ctggcctttttacccgcgtcagtgaattttaagactagggggttgcattgaccccccggtgtggcactctggacgccactggagaccgaggaatcataacaggggccctgatttttaggagtgtttcctcgcttaagggaaattaggtcctatgatgatgatggctttcagtatgcctgtccagtggttttacatccccatttgccacagtagccctctcccggccctccacaccctattggtacagtatgaccggggcaaacatagaagtcatacagtcttgtccttttttttccccccggagagcggcaaccatttttaatatcgggttctgggttattctaatggtttttaactaaattacacaagttaaaatatagtttagggaaggtgtctgtcattgtccccaggagggaggtagcgttagctgtttgtcctgtcattaggttggtaactcttcagtgacat

SEQ ID NO: 932 - DNA, 444 bp, Homo sapiens
aaaacaagcaaattttattaaaggaaaattttgcaggtttaaggtttgcaggtgaaattttgtaggtgaaaaggtttacttttcaccagtctgttctggcatgcttctaatgatgtcagagtcacctggatcaatgatagccagtgtgcacactctgtagtattttccgcatgctgtgcccagttcaatattattgccactgtagtgatggacaccagttttagccaacatagcatagtactctatttcagatttcctcaaagctgggcagttgttagcgagaatgaccaatttcgctttgccttgtctgatcatcttcagagtctgcttgtaccccaggacgtacttcccacttttcataacgagttggagcctagagttgatcgactccagcgactttttcgtcttctttgcggccaccatcttcctgccttaggagcggga

SEQ ID NO: 933 - DNA, 454 bp, Homo sapiens
ccaattgaaacaaacagttctgagaccgttcttccaccactgattaagagtggggtggcaggtattagggataatattcatttagccttctgagctttctgggcagacttggtgaccttgccagctccagcagcctccttgtccactgctttgatgacacccaccgcaactgtctgtctcatatcacgaacagcaaagcgacccaaaggtggatagtctgagaagctctcaacacacatgggcttgccaggaaccatatcaacaatggcagcatcaccagacttcaagaatttagggccatcttccagctttttaccagaacggcgatcaatcttttccttcagctcagcaaacttgcatgcaatgtgagccgtgtggcaatccaatacaggggcatagccggcgcttatttggcctggatggttcaggataatcacctgagcagtgaagccag

SEQ ID NO: 934 - DNA, 426 bp, Homo sapiens
ctggctagcaacggctcgtgccaagagtgtttttcccgtacctggtggtccatataacaaacagccttttggaggtattattcctacacgctgaaataactctgggtttgtaagaggtaattctatcacctctcttaattcccggatctgttctgatagccctccaatctcagaataagaaacattcccagggtcctcatgagacatgttataaaccagtggatccacctctctcggcaaatatctcatgatagttagtgtagtcatatccaaagcaactcttgttcctggcttcagcttacttttgtcaagctgtcgacgacaacccacaacatatcttggtccattggtagctttaacaatgaatttttcttcagttaactgtttaagcacttcacccacgatctgcccaacactctgtagggc

SEQ ID NO: 935 - DNA, 451 bp, Homo sapiens
ctgtctcttacttttaaccagtgaaattgacctgcccgtgaagaggcgggcatgacacagcaagacgagaagaccctatggagctttaatttattaatgcaaacagtacctaacaaacccacaggtcctaaactaccaaacctgcattaaaaatttcggttggggcgacctcggagcagaacccaacctccgagcagtacatgctaagacttcaccagtcaaagcgaactactatactcaattgatccaataacttgaccaacggaacaagttaccctagggataacagcgcaatcctattctagagtccatatcaacaatagggtttacgacctcgatgttggatcaggacatcccgatggtgcagccgctattaaaggttcgtttgttcaacgattaaagtcctacgtgatctgagttcagaccggagtaatccaggtcggtttctatc

SEQ ID NO: 936 - DNA, 456 bp, Homo sapiens
cctacctcattggcatattaagaaagttttctcaagtatatttagtgtttatcattttactatagttcttcaaatgtctgacattcatcttttccctacctctaaattcctttctttttcacattatctttcttgattgctttttaatagaaaaacaaacaaagacatggatttactgtgcatattagcagatccatactggaaaatgcatggaggtttcatatacaccacttacagtaagtaataactcagagtataaagtcgaaaagaaagaatctgaaatattagacttgttctgaaataagcttacctaggatgataccactttcgcttaatcagaatttcccctttccaactatttaacagcggcaaatataaaaaatctggtagttaaaatacacagcagtcacttcatattactgcctccctcaacccactcaccttctgaagaacagg

SEQ ID NO: 937 - DNA, 483 bp, Homo sapiens
cctcctcatcctcctccttcaggcgcggcctctatggtgcctggggctcccccgccttctcaacaacctgggacgggggacaggctgctaaacctagtaaaaggagcctatcaagcactcaacctcaccagtcccgacagaacccaagagtgctggctgtgtctggtatcgggacccccctactacgaaggggttgccgtcctaggtacctactccaaccatacctctgccccagctaactgctccgtggcctcccaacacaagctgaccctgtccgaagtgaccgggcagggactctgcgtaggagcagttcccaaaacccatcaggccctgtgtaataccacccagaaggcgagcgacgggtcctactatctggctgctcccgccgggaccatctgggcttgcaacaccgggctcactccctgcctatctaccactgtactcaacctcaccaccgattactgtgtcctggttgagctctgg

SEQ ID NO: 938 - DNA, 454 bp, Homo sapiens; identical to SEQ ID NO: 724

SEQ ID NO: 939 - DNA, 488 bp, Homo sapiens
gtgaaacagaaaatggaggagatgcagcagcacaacatgtcctggattgaggtgcagttcctgaagaaggcagttgatgtcctctgccagtgtcgtgccacactcatgtacacttatgtcttcgctttctacctcaaaaagaataaccagtccattatctttgagaataaccaagcagatctagagaatgccacagaggtgctctcggactaccttgaacgagatatttcccaagattctctgcaggatataaagcagaaagtacaagacaagtacagatactgtgagagtcgacgaagggttttgttacagcatgtgcatgaaggctatgaaaaagatctgtgggagtacattgaggactgagaatggccctgcataaaatgaactctgaaaactttaccatctagagtgctcatgcaattaaaacaaaacaaacacaaacaaggaggcactaagcctattctgacaccactggtctgtagtaccag

SEQ ID NO: 940 - DNA, 461 bp, Homo sapiens
cctgacattcctgccttcttatattaataagaaaaataaaacaaaatggtgttgaagtgttggggcggcgaaaatttttggggggtggtatggagagagaatgggtgatgtttctcagggctgcttcaagcgggattaggggcggcgtgggaacctagagtgggagagattaagctgaagggaggtcttgtggtaaggggtgatattgtggggatgttagaagaaacatttgtcgtatagaatgattggtgatggcctggatacagttttggatgaattgagaaactaaatggaataacagaaggagaaaaacaggtataaaaggtctaagaattgggacgactcaggatatctgattagagagtgcctaaggagattcagcatagtcctgccagcaaagattatttatttacctcaagagttaagagtgatagtttggggatagcaccaggagatatcag

SEQ ID NO: 941 - DNA, 366 bp, Homo sapiens
aaaaatatccttgtagtcatggacaatacgctctgatacagccttgtcaagcatttttttgtaccattcctgcagtcgcttgggcttgggtatcttctggtcaggaggatggcaatggaagatataatcatctccctcacttggtggacatgcccaaatatgccctgttgtgtaacctaatttcttgacatattctaaatatccaattaggatttcatgatagactgcagtcctcaagcatttaggacggaagaaatgaacactatcgaggtaagatatgtatactctcctctggttgggtggagggcagwcaragccatactcttgaacatgcatgccaaagaagcacaggtcaacaccatcaat

SEQ ID NO: 942 - DNA, 454 bp, Homo sapiens; identical to SEQ ID NO: 717

SEQ ID NO: 943 - DNA, 81 bp, Homo sapiens
aaaagttagaatctcaagagataccaaaagcacttaagagttaccaccacattttgcccaagttctaaggaagttctgaac

SEQ ID NO: 944 - DNA, 252 bp, Homo sapiens
gtcctggttccccttctactacatgctgaagtgtggcttcctgctgtggtgcatggcccccagcccggctaatggggctgagatgctctacaggcgaatcatccgtcctatcttcctcaagcacgagtcccaggtagacagtgtggtgaaggacgtgaaggacaaagccaaagagactgcagatgccatcagcaaagaagtcaagaaagctacagtgaacttgctgggcgatgagaagaagagcacctgagg

SEQ ID NO: 945 - DNA, 572 bp, Homo sapiens
cctttatttggcctgagattttattcaactactttatagatgctgggtttattcatactatcgccagtttttataaaaatggaaaactagctcatcctttttgcaaaagaaagcaaagtggggagtcagaatgagaagtggataggggataactaaaactattctttactctcctttcattgcctttgagagctagctcttgcacacactgactttggcttccttagcgcataggtaagggaattgcctttccctcttttgtgaatattctcatttctgaaaaattctaagtcatgagaagataagccctatcctttcttacaaggattggatttcttgggtgacactgtggtgtggtggaagccagcggcttctttcaggttcataaaggccatcataacaacttcaggcttcatggtgtggacagggatccaggagagctgagtggatgtgtgaagtttctgatagattctgtcatcattccaaaggaatgtagtttcctccagctcaatcatttgaagtaatacacattgccaaatctgactgtaacctgacattttagacctattgga

SEQ ID NO: 946 - DNA, 85 bp, Homo sapiens
gaggtctggttcgagcggtgaagccgcgctcccctggaagcgacccaggggaggccaagttgtcagctttttgatcctctactgt

SEQ ID NO: 947 - DNA, 507 bp, Homo sapiens
aataattcaaacacaaactgatwgggcattacctggcttgccttgtasgacctaatattcttttatctgattataggtggcccccagttctcgcaatttttttakatctgtttcggtgtaatggagataggcaggcgtgtacggggtckagtkctctataaggagtgtakaggcttctggaactgtttttgtggctgcctctcgggccgccwgrtctgccatackgttgcctctggcttcggcactgtcttctttctgatgttctgggcaatggataatactgagtttttttggcaaaaagarggctttcagcaaggctrggatctcrcttttgtttttgatttccttgccttctgaggtcagcaacccccgtctcctatatattttcccatgaacatgggccgtaacgaaggcmtagcggctattaktgtaaacatttascttcttaccttctgcmmttttcasggcttgggtgagtgcgatcagttcggctcgctgggcygacgt

SEQ ID NO: 948 - DNA, 405 bp, Homo sapiens
cctaattctatcttgaccaccaacatcccatactgtgaaacaaatgttcttatattctactgtttccacattaaaaccaatggtaggaatggtggtgactatctcccctaacttcagtttatacagaatggttgtcttgccagcagcatccaatccaaccatcaaaatgcgcatctgcttcttgccaaatagtcgggagaagagggaggagatagtgaggcccatggcggtagtggcacttgtgatgggcagaagcagaaggggtttggggcgaccctgtgctttctcctttcaagctcccaggcaaactaaacgagagggaagagaaagagcggaggaagaaagagggaggcagaaacgtctcagtggcccctgtgccgatgaagatccggcacaggaataagc

SEQ ID NO: 949 - DNA, 437 bp, Homo sapiens
cctgagccaccgtgcccggccatgttgcttttataattgagatatttcatttgttttgggggttaggcaaatttaatttgccattcctcaaactcagtaacttcaaatataaacaatgcctagaatgaatatggttcctcattatttctatcaaactactacaaatactgaagaatcccaaagtagttttccacagaggcagaaaagcagttcaggggttgaaaatcttcaatattaataagccctgggacattcaaatggcacttcatatttcaaggtaatgcaatatgaatcataattcattatatattgtccccaagagttacttcaactccgtattcaccagttcttacgatttggaaaaaaaaacttgaatgtttccagatgaaatctaatccccaagccttgtgtgtcaacattctagtgaatctctattt

SEQ ID NO: 950 - DNA, 583 bp, Homo sapiens
aaagaatcagcaaaatttcaaataaaaaattatgaaaatattatcctcattagttcatttagtcccatgaaattaattattttctctgcttgatcttggtggacagtttcatgaagctgtcagttagttcattaaagttttggaaattctcagacagtgcagtggtatcagaaacttgtattcaagagtacaggtcagagtcttcttttcttttctttttgagatggagtcttgctctgttgccagactggagtgcagtggtgcgatctgggctcactgcaatctccacctcccgggttcaagcgattctcctgcctcagcctcccgagtaactgggactacaggtgcgcgccaccaagcccagctcatttttgtatttttagtagagatggggtttcacgatgttggctaggatggtctcgatctctggtcagagtcttttctgtaaatatccttggtaaagaagcaattttagactgtagctgttgcaaatgctttaaggaagaagcaaaacaactgtcagtcttcctgaaatgaagaaactacaccagggctgctatatcagagcaaccccaaccagcac

SEQ ID NO: 951 - DNA, 610 bp, Homo sapiens
ctgtcaccaccaagcatgaactttcactgattacccataacctactggaaatcttcagccttgctgtcagcatagaccactgtgagaaacagtacattccattccagtttgccctgctttttgaagatctaaatgccattccatgttttctgttacatattgaagtttcttggttgccaaagaaaaacggattctgctgaacttgtggacagaacaaccccaaggttggaagaacaatgaaaaataatctatacttgaacatttcaaaagttaaaattttcaacagagttttaacacactgaagcttaaaatacattgacactgaaatgtcaatgggcaaacaccaatttcgccgttcattatgaaatacatcaaacaaaacttgccaaaaatacaaccataaaaatatagcaaatgtatgtatgagcaaactaatgctaaaaatgtctaattttcttggctagtctttcaaggaccagattcatgagtgttatttgaagggaaaaagtgaaatacttggaattattttgagtgatgtgctcctgagcttgttcttaaaatctaccagtggtagcttttgaaaagaatgtgtttcataccgatgtgcagg

SEQ ID NO: 952 - DNA, 627 bp, Homo sapiens
aaaaatgtaaacattagtcttagcttgcaggcagcacaaaagcgggtggtagaccaaatgtggacccagggtgtagtttgccaaacccttttattagatcaccaaagttacttttcttaaaataccttctatttttcacagaaggtataaatggtaaacaacatcttaaagcatcggtagtagtggataccttggatatcactgtcactctcttaccgggtttaattttgcatggctggtgtgggcgtaattgagtgtgcatgtagagcatctttataatattaccatcagcacatttggtacttgcacccttgtagttctaggaaaagtcctaaaaatctataaatgcaattacttctagggaaagtaaattgaaatgcacattggcttataagaaactcattcttctaaggctcaggaaacaacactgtttcccatttattgcttcaaacttcttttatatatggtgtcagaattattcccagtcctaaatcaaggaatattggaacattgttagtttctccaatggattgtaagttagcacactgattaagatgcatctgactctagtggaaaatgtcctcaattgatgtctcttcttattgctattttttatttggcatttct

SEQ ID NO: 953 - DNA, 456 bp, Homo sapiens
ccacaggaactcatgtcgggaaagtgaacatttttggtgtggaaagtgggaaaaaggaatattctttggacacgagaggaaaattcattcttagtattgcatatagtcctgatgggaaatacctagccagtggagccatagatggaatcatcaatatttttgatattgcaactggaaaacttctgcataccctggaaggccatgccatgcccattcgctccttgaccttttccccggactcccagctccttgtcactgcttcagatgatggctacatcaagatctatgatgtacaacatgccaatttggctggcacgctgagcggccatgcctcctgggtgctgaacgttgcattctgtcctgatgacactcactttgtttccagttcgtctgacaaaagtgtaaaagtttgggatgttggaacgaggacttgtgttcacaccttctttgatcacc

SEQ ID NO: 954 - DNA, 511 bp, Homo sapiens
ctgctctaggtgcaaaggcatgttgggaaagagatggatgttggggaggaagagaggagatggatttcagttgggagttaggaggagagtaggtgagatgatcagacaccggagttcaacgtcccagcagtcttggtaaaaggagggagcctgctgagccaggagggagaaaagaagattgaccagcttgctagaaaaatacttagcttttctttttcttttttgtggaggggggacggagaggaacaaggatggggaggtaggaatgaggtatagaaaagagatagcatcttctttggcacaagactagtggcttaccgcttaccttagagttttgttttttttttttttcaaacccatcaaaatctacttatttatgaatccaaggggtggcagcatcactctgttctagcattctttgtggagatggtctggtgcctagctgggagtgagcagcagcccatcccctgttcactttctctagcccatcattacctgtgaactgcagtgg

SEQ ID NO: 955 - DNA, 101 bp, Homo sapiens
ctggaacgtcagcccagcgagccgaactgatcgcactcacccaagccctgaaaatggcagaaggtaagaagctaaatgtttacactgatagccgctatgcc

SEQ ID NO: 956 - DNA, 551 bp, Homo sapiens
ccttctaattagcatcagaaagttcctggattcccaggcacgcctcctgaaaaagctgagagatatgtctctttccagtcttcttgagtgaggctaggttgcaagctctgggctgttcaaaggttgccagaatctctccattggagggatagaagcagtgtccctattctgacttgtcagagagtgagcttgtgacccttgaaaggtggtgggtatcccttctcatcccctcggacctccacagttgatgcgtatgtctcccaggggaattaggtcacttaactcaagagcaatgtttgcccaggagcaagcaatgctggggagctttcctctagattggaaatggttcttgttgccctaccaggaaaagaattaagaaaacaaccctaaccattgtctcagtactttgtactgattgaagaaaaccacctctctgacaagcgctaatagcatctactacatttaatgtcatagattcttatttagcaagtgagctggattcgttgcaaacattcacaacttccattcagagaggctggcagatgtcagat

SEQ ID NO: 957 - DNA, 543 bp, Homo sapiens
ctggccaactcagccaatccgcacatttagctctccaactaccatacaacgtgcttggtttaggtcggagcgcaaattttcttgaccatctctacgttggtattccccgtccatctggagaaaaatctatacgaaaacaagagtggactgcaatcattccaaattcccagctaattgtcattccataccctcacaatgtccctcgaagttggagtgccaaactgtatcttacaccaagtaatattgttctgcttactgctatagctctcatcggtgtctgtgttttcatcttggcaataattggcattttacattggcaggaaaagaaagcagatgatagagaaaaacgacaagawgcccaccggtttcattttgatgctatgtgacttgcctttaatattacataatggaatggctgttcacttgattagttgaaacacaaattctggcttgaaaaaataggggagattaaatattatttataaatgatgtatcccatggtaattattggaaagtattcaaataaatatggtttgaatatgt

SEQ ID NO: 958 - DNA, 540 bp, Homo sapiens
atgcccttctcgttcctgacaagtgcaaattcttacaccaggagaggatggatgtttgcgaaactcatcttcactggcacaccgtcgccaaagagacatgcagtgagaagagtaccaacttgcatgactacggcatgttgctgccctgcggaattgacaagttccgaggggtagagtttgtgtgttgcccactggctgaagaaagtgacaatgtggattctgctgatgcggaggaggatgactcggatgtctggtggggcggagcagacacagactatgcagatgggagtgaagacaaagtagtagaagtagcagaggaggaagaagtggctgaggtggaagaagaagaagccgatgatgacgaggacgatgaggatggtgatgaggtagaggaagaggctgaggaaccctacgaagaagccacagagagaaccaccagcattgccaccaccaccaccaccaccacagagtctgtggaagaggtggttcgagaggtgtgctctgaacaagccgagacggggccgtgccgagcaatgatct

SEQ ID NO: 959 - DNA, 187 bp, Homo sapiens
gcatggccgggcccgcattgcacgcttgatgttagaatctgaatacaggagcgacatcattaatgcaaaaagcaatgacggctggactcccctccatgtggctgcccactacggcagggactcatttgtccggctcctcctggagttcaaggctgaggttgacccactcagtgataaaggtaccaca

SEQ ID NO: 960 - DNA, 480 bp, Homo sapiens
tttttttttttttttttttgagaccctcatcaatagatggagacatacagaaatagtcaaaccacatctacaaaatgccagtatcaggcggcggcttcgaagccaaagtgatgtttggatgtaaagtgaaatattakttggcggatgaagcagatagtgaggaaagttgagccaataatgacgtgaagtccgtggaagcctgtggctacaaaaaatgttgagccgtaratgccgtcggaaatggtgaagggagactcgaagtactctgaggcttgtaggagggtaaaatagagacccagtaaaattgtaataagcagtgcttgaattatttggtttcggttgttttctattaractatggtgagctcaggkgattgatactcctgatgcgagtaatacggatgtgtttaggagtgggacttctaggggatttascggggtgatgcctgttgggggcchvtgccctcctaattggggggta

SEQ ID NO: 961 - DNA, 416 bp, Homo sapiens
ctggtgactccgtgtatacttacttcagtgctgttgctggacaggatggtgaagtggatgctgaagaacttcagagatgtttgacacagtctggaattaatggaacttactctcccttcagtttggaaacctgcagaattatgattgccatgttggatagagatcacacaggaaaaatgggatttaatgcattcaaagagctatgggcagctcttaatgcctggaaggaaaacttcatgactgttgatcaagatggaagtggcacagtagaacatcatgagttgcgtcaagccattggtcttatgggttataggttgagtcctcaaacattaactactattgttaaacgttatagcaagaatggcagaattttctttgatgattatgttgcttgctgtgtgaagcttcgagcattg

SEQ ID NO: 962 - DNA, 454 bp, Homo sapiens; identical to SEQ ID NO: 724

SEQ ID NO: 963 - DNA, 338 bp, Homo sapiens
aaagcttccattccagccctgcagatatgtatgcacgttactgtgctgtcagcccctcacacattccaggtggtccctgaaggtggggctttggcactgcagggatgcagggaaacctcaggtgaaaatgcacatcctaaattccttttccatttccacattccaatcagtgaaatgtggcatgacagggaggatctgtgaggtatgttcagggtagaatccctcaaagacacaggctttcatcatcatacatggtccagccatgaatctttgtttttttgcgggggtgggggcatgagtcttttttcaacaggtttggagggatgatcgtaggtcac

SEQ ID NO: 964 - DNA, 514 bp, Homo sapiens
ctcagccttcttggaaagaaaaaaaagaggctccgggttgacaaatggtggggtaacagaaaggaactggctaccgttcggactatttgtagtcatgtacagaacatgatcaagggtgttacactgggcttccgttacaagatgaggtctgtgtatgctcacttccccatcaacgttgttatccaggagaatgggtctcttgttgaaatccgaaatttcttgggtgaaaaatacatccgcagggttcggatgagaccaggtgttgcttgttcagtatctcaagcccagaaagatgaattaatccttgaaggaaatgacattgagcttgtttcaaattcagcggctttgattcagcaagccacaacagttaaaaacaaggatatcaggaaatttttggatggtatctatgtctctgaaaaaggaactgttcagtaggctgatgaataagatctaagagttacctggctacagaaagaagatgccagatgacacttaagacctacttgtgatattt

SEQ ID NO: 965 - DNA, 661 bp, Homo sapiens
aaatgccatgatccaggatggattttagatcttgttgaaagcagccacatccatggactgcacatagtcctcaaaagcagtgatctgctcctccagcatatctgttccaactttatcatcttcaactacacactgtatttgaagtttcttaattccgtatcccactggaactagtttagatgagccccagactaagccgtctgcttgaatgcttctgacgcactcctctaatttcgccatatctgtctcatcatcccaaggtttcacatctagtaagatggaagacttggcaacaagtgcaggttttttggctttctttgattcatattgtgcaagacgttcttcccttagcctccttgcttcttcactttcctcctcatcatcagatccaaagaggtcaatgtcatcatcatctttactatctgtagctccacttcctgtagtgtcttccacatcggcaggaccatatttgcccaaagctttcttcactcctggcaggctggccttttccttttcgtaagacttgatgtgattataccaacgtagggcatgacacaagtcggcaggcggtgggctggacacggcttcaaatactgccacatctgcttgtgatggcacataccccycgatgtagctcttgtccgccaggtaatcgttgagc

SEQ ID NO: 966 - DNA, 474 bp, Homo sapiens
  misc_feature 414, 440: n = A,T,C or G
aaatcaaacggtattgagatggattgggttatgaaacataatggtccaaatgacgctagtgatgggacagtacgacttcgtggactaccatttggttgcagcaaagaggaaatagttcagttctttcaaggtatattgagatcttcagaagtagcaggagtgaaatcaaaggattttatgatccaccaagaagattgctgggacagcgaccgggaccatatgatagaccaataggaggaagagggggttattatggagctgggcgtggaagttatggaggttttgatgactatggtggctataataattacggctatgggaatgatggctttgatgacagaatgagagatggaagaggtatgggaggacatggctatggtggagctggtgatgcaagttcaggttttcatggtngtcatttcgtacatatgagagggthnycttttcgtgcaactgaaaatgacattgctaatt

SEQ ID NO: 967 - DNA, 571 bp, Homo sapiens
aaatcttaaagacataaattgagggtccatactttgtttagtgcttatctagaagaatgcattgccacatcacatactcaggtattgattttcagattttagaaaactatcattgttcatactaaaaagcatcacagttgactgtttattattggttcagaaagatcacaggaggaaacagaatgtaaaaacattcttagcatatgctggttttaatctaggatatagttaaaaactagagggaaaaaataatccatgtgttacatatagcgaggctaaataaagcagggcataaattagaaatttactcagaagctaattttcactggtatacgtggtctcagaaatcagtatttmyaactccaatttttcatgcagggttagagtggcttaaataatacttttgaaatttttaagcctctcaaagaaaccctgtaagcaactwstctgchggaagaattttggtaaacccttcttccactctaactccagcttactgctcatgaatcaccacaacaacagcttcaacaagaacagaatgaagttctggtatcttaattttacacctatg

SEQ ID NO: 968 - DNA, 523 bp, Homo sapiens
ctgaacaggaggatggatacagccgcgaggctaaaaaacggatttcctcttcctagcttaaaatctgatttacactgttttgttttttaagaaacaaaagtgcatagtttagatttttttttgttgaatatgtttgttcttggactttatgagatagtcttataagaatcacgattttctacacctgtcattgagccaagaaagtccagcttatgacacgtatgtactagtgaacaccgtcctcgatctgtacgaaatgtgaaatgtttagggacatctccatgctgtcacttgtgatttgccctcttatgtattttggtcatattgccaactggaaagtcaaaattttctaacaactttaagtaagttctttgaagacttagtgctgtttttaatccagtttagaaagtaacttaattttaataccgctactaaaaattcgaaaatttcttctttaatcacattcaatatggttaaaagaacaacactaattgacattgcgtgggctttttctccyttgttt

SEQ ID NO: 969 - DNA, 515 bp, Homo sapiens
ggcctcgaggctttttttctccagccgagaggacgcggctgtgatatacgaagactttgtgtggacagtaatgacctcacgtttccgattgcctgctggcagaacctacaatgtacgagcatcagagttggcccgagacagacagcatactgaagtggtttgcaacatccttcttctggataacactgtacaagctttcaaagtcaattctctagtgatccctgaaaagttccagcatattttgcgagtactcaacaccaacatcgatgggcggcggaaaatagcctttgccatcactgccattaagggtgtgggccgaagatatgctcatgtggtgttgaggaaagcagacattgacctcaccaagagggcgggagaactcactgaggatgaggtggaacgtgtgatcaccattatgcagaatccacgccagtacaagatcccagactggttcttgaacagacagaaggatgtaaaggatggaaaatacagccaggtcctagccaatggtctgg

SEQ ID NO: 970 - DNA, 464 bp, Homo sapiens
cctcccagcgccccaacccctccttggtctaatgaaatgcagttcttagtgcagagatgttttaaggtgcaatatatctcttcctttcccgtggttttagagccaagctcaaggtagtaggacgtagggtcttattttgttttcaaacccccatcctcagagcgcagatacatgcagaggcttctgccaggataccacggggccttagtgggaacaggtggagaccagcacttccctttcctgctgctgaggtagggattggggggtcagaacccactcacttttgcctgttaaagttgccctcctgacgctggcagctctgccttggtcactggggatgcggctcgttgctcagccaccagtggccttgcggtattgtccaccatccactagagcgggatgaagtccagagtgtgggtatacatctcagatgcccatctacccactggggacttcaatgccag

SEQ ID NO: 971 - DNA, 578 bp, Homo sapiens
aaaaatctttttgaagtacagtactaataaactaaggactacctagagatcacacttttagatattatctattttaacatagattaaaaatactgtttatatgaaaattaagcttaaatacacgtataggtaataattattttgcccatatacaagtaatgtaaacagaggctatcaaggtgacccattatctactctaatttatatccactatgagcttcttcccagttgttatacaatgccatattttaattcctgactgaatggttaggaaagcaaaatgtaactctgtaaacttgatcagcactaatgtacaacatattatggagggtaaagtgaagcaagaatatattcaagtaaaataaaatgtctttcatgggcattcaaatcccacatctctctatatttctttcccaactaagagctataattaaaatcccatttattatttttctatagttcagaatcaacgtataaaatatgatgaaagtgaaactatctccctatatatcacatcatatatattgtgagaaagtcacttgttatatatggatatttcaattaactcataaattttt

SEQ ID NO: 972 - DNA, 581 bp, Homo sapiens
tgtgccgagaacaccgagcactgaactttacaaagaccttcgtctttgagaagacggtagcttctgcagttaggaggtgcagacacttgctctcctatgtagttctcagatgcgtaaagcagaacagcctcccgaatgaagcgttgccattgaactcaccagtgagttagcagcacgtgttcccgacataacattgtactgtaatggagtgagcgtagcagctcagctctttggatcagtctttgtgatttcatagcgagttttctgaccagcttttgcggagattttgaacagaactgctatttcctctaatgaagaattctgtttagctgtgggtgtgccgggtggggtgtgtgtgatcaaaggacaaagacagtattttgacaaaatacgaagtggagatttacactacattgtacaaggaatgaaagtgtcacgggtaaaaactctaaaaggttaatttctgtcaaatgcagtagatgatgaaagaaaggttggtattatcaggaaatgttttcttaagcttttcctttctcttacacctgccatgcctccccaaattgggcatttaattcatcttt

SEQ ID NO: 973 - DNA, 583 bp, Homo sapiens
ttgaaggatgcttacactcttgtccatctagacctcaattactgtttttcaggaatgtctgatcacagatacggggatggtggctctactttccagagcacaacagggcactgtgtacacatgcggggattaccttacagagctactgagaatgacatttataattttttttcaccgctcaaccctgtgagagtacacattgaaattggtcctgatggcagagtaactggtgaagcagatgtcgagttcgcaactcatgaagatgctgtggcagctatgtcaaaagacaaagcaaatatgcaacacagatatgtagaactcttcttgaattctacagcaggagcaagcggtggtgcttacggtagccaaatgctaggaggcatgggtttgtgtaaatatcactttagtgtcttttttttaagctaaccttttgtatgccttttctctcatttcagaacacagatatgtagaactcttcttgaattctacagcaggagcaagcggtggtgcttatggtagccaaatgatgggaggcatgggcttgtcaaaccagtccagctacgggggcccagccagccagcag

SEQ ID NO: 974 - DNA, 534 bp, Homo sapiens
ctgcagcctgggactgaccgggaggctctgattatttacccaccacaggtaggttgtgttctgaatctcaggttcacaggttaaggctacagcatcctcatcctccacggggttggagttgttgctggtgatgaagggtttgggtggctctgcatagactgtgatcgtcgtgactgtggtcctattgaggccagtgtctgagttatgggcttggcacgtataggatccactattattcacagtgatgttggggataaagagctcttgggtggattgctggaaagtcccattgacaaaccaagagtactgtgcaggtgggttagaggctgcgtggcaggagaggttcagattttcccctgatctgtaagatgtgtttagaggggaaatggtgggggcatccgggccatagaggacattcaggatgactgaatcactgcgcctggcactcactgggttctgggtttcacatttgtagcttgctgtgtcatttcttgtgacattgaatagagtgagggtcctgttgccattggacag

SEQ ID NO: 975 - DNA, 457 bp, Homo sapiens
ctgacaggttacacaatatatatcagacaatgtgacacaaaacatagctctcctctttcgtctcacagaggaactaaagttccaaaatatatacaaaaccatcttccatctccaactgtcttctctttcttcccagttttatgcaaagcagtctcattaatacattcttcaccaggctcaaccaagtagcgtagtgtcttccattgcacctctaaagttggaagattctgatcccacgtcttgacgtgttccaaaaaacaatcaggtcacaaaggtaacagcaaaatacgaggccatgcccaacatttcaaaaacacagcgaagtaacaagaataaacgtgaccacaaaaacaacttaattaagccccatttctcttctgagagtatttctttgacaaaagttatatttccaaaaccaaacacatttgataatctaaatccatatmkhggtcatcaa

SEQ ID NO: 976 - DNA, 64 bp, Homo sapiens
ccaacatgattagtgaaccaaggatcagttacggaaacgatgctctcatgccatctttgaccga

SEQ ID NO: 977 - DNA, 419 bp, Homo sapiens
aaatgtcaccagtgtcacaaatggagcacatcctgaagccacttcagagcaaccacagcagaacagtacacaagactctggactacaggaaagtgaagtatcagcagaaaatatcttaactgtagccaaggatccaagatatgccagatatctcaaaatggttcaagtgggtgtaccagtgatggcaataagaaacaaaatgatatcagaaggactagacccagatcttcttgagaggccagatgctccagtgcctgatggcgaaagtgagaaaactgtagaagaaagttcagatagcgaatcttcttttagtgattaagcttaattttgataagaattacatatgcatgcataggggtacatttacattctgtaagagattgagcctgaactctcttagtcataaaaacatcaaatgg

SEQ ID NO: 978 - DNA, 522 bp, Homo sapiens
aaaacctttgacttgagtctgctggtaaagcttctgaatattgagtttgctgagaaataaaaatcaaaacttctttaagctggtaaagtgaggggcccaccagcagtgatctcctgatgccttactggaaactttgtttacttgtctgctaccctctgatttgtttttagttagtttttattgtgagcacacatagtacctagttacatcttaagatcaggtgtataaaactgtggagtggagcggtatggtatggaatgacttggaatgtaagctgtcagggagaaaatgttgttacacttttgctaagatctgggggtttcttcatattcctgctgttggaagcagttgaccagaaatgcttgccagtactgccaaagcactgctgtgaaatgtgaagtactttgtttttttatttttaatgattttctttttgttattaatatttttctctgttcctttgttattacttgcatggtttggcgtcagaagtccttacctctttatattgtttgcaggttt

SEQ ID NO: 979 - DNA, 177 bp, Homo sapiens
aaaatcagttttgaaagtggttcccgacttctttgctttgggagaatttggtcttatgctcataagcagttcatgagtgacaagtgtagcaaaagccagccatatattttyagaatctataccctcaggaattggtcctttttttttctataaatcaccaaccaactatctaaatgg

SEQ ID NO: 980 - DNA, 530 bp, Homo sapiens
agaaccggagaggattagatctgctgttcctaaaagaaggaggattatgtgctgccctaaaagaagaatgctgtttctatgcagaccacactggcgtagtaagggatagcatggctaagctaagagaaaggctaaaccagaggcaaaaattgttcgaatcaggacaagggtggtttgagggactgtttaacaggtccccatggttcacgaccctgatatccaccattatgggccctctgatagtacttttattaatcctactcctcggaccctgcattctcaaccgcttggtccagtttgtaaaagacagaatttcggtggtgcaggccctggttctgacccaacagtatcaccaactcaaatcaatagatccagaagaagtagaatcgcgtgaataaaagattttattcagtttccagaaagaggggggaatgaaagaccccaccataaggcttagyawgctagttgcagtaacgccattttgcaaggcatgaaaaagtaccagagctgagttctcaaaagtcacaaag

SEQ ID NO: 981 - DNA, 436 bp, Homo sapiens
tgtcaactgcatccgtgaagatgtggctgcctacatcaccaggagggatggcggtgtgcctgcggaccccgacaacatctacctgaccacgggagctagtgacggcatttctacgatcctgaagatcctcgtctccgggggcggcaagtcacggacaggccaggtacaaagcagaaagtgcatagaagatgtgatccactttgcctgggaagagaagctctttctcctggctgatgaggtgtaccaggacaacgtgtactctccagattgcagattccactccttcaagaaggtgctgtacgagatggggcccgagtactccagcaacgtggagctcgcctccttccactccacctccaagggctacatgggcgagtgtggttacagaggaggctacatggaggtgatcaacctgcaccctgagatcaagggccag

SEQ ID NO: 982 - DNA, 131 bp, Homo sapiens
cagtttttgtaattttagtagagacagggtttcaccgtgttagccaggatggtctcgatctcctgacctcgtgatctgcctgcctcggcctcccaaagtgctgggattacaggcgtgaaccactgcacccg

SEQ ID NO: 983 - DNA, 557 bp, Homo sapiens
ctgaaatgcatttcagaaataggaggtttcgtccagcaccctctgcagccttggtgcctgtagctctggacttccctgggcctttccctgtgggagggccctgtagaccacatcagggtggggtgggggtcacttggcaaaaagggccgaggtctggtgatgtggttcccaggatctggaacctctcccacccctcctgcagttggactgaattcttccctttcatccgaagaaacccacttgctgtttccagccgctgaatctgctgagtgtgcagcctgcatcacctgctgtatgccgatcatctcagaaagggccgtgtagagtagggccctgttctccttaggatgttgcttcttgatttttttttttttttaggggtgggtcagggttgtgacacaccagcccaggtgagagctgctgcgggtcacctcatatttatttatcccttcttgcctgtgaggactgcggcttttcgctgtggctcgtccttaacgtttctgaaccaccttggtgccctgagcaggaagatgtgccacttcctagcaggcgcaagg

SEQ ID NO: 984 - DNA, 478 bp, Homo sapiens
ctgaaccctcgtggagccattcatacaggtccctaattaaggaacaagtgattatgctacctttgcacggttagggtaccgcggccgttaaacatgtgtcactgggcaggcggtgcctctaatactggtgatgctagaggtgatgtttttggtaaacaggcggggtaagatttgccgagttccttttactttttttaacctttccttatgagcatgcctgtgttgggttgacagtgagggtaataatgacttgttggttgattgtagatattgggctgttaattgtcagttcagtgttttaatctgacgcaggcttatgcggaggagaatgttttcatgttacttatactaacattagttcttctatagggtgatagattggtccaattgggtgtgaggagttcagttatatgtttgggattttttaggtagtgggtgttgagcttgaacgctttcttaattggtggctgcttttagg

SEQ ID NO: 985 - DNA, 434 bp, Homo sapiens
cccagctactcaggaggctgaggaaggagaattgcttgaacacaaaggtggaggttgcagtgagccaagatcgcgccactgcactccagcctgggtgacagagcgagactccagctctcaaaacaaaaaaaacaaacaaaaaaaaaacaaaaagtctcctatgtgagttagaacaaaggattgacatctttgacaataattagactggcataagactaccacatgttataaagtgctaaactgcatatcatagaataaatgatccgagagtttagatgaggcaaataacagagtaatcaaaaatggcttcaggtagtcggtaaaatttgaacaggtagaatcagctaggaaaaagatattccatatagagtgaatatcctaggcaaatgcagagaatgaggagggagtttgtaaaggacagagtgatttgtagg

SEQ ID NO: 986 - DNA, 270 bp, Homo sapiens
ccaggctagtctcgaactgacctcaggtgatccacccgcctcagcctcctaaagtgctgggattacaggtgtgagccaccacgcctggcctcataccatctacttcaaagtccttcgtcctatttgtttctaaatttaactctgaacatttatctaaaccattaataacttaaattcccaatatctagcactattagcttttctgttagtatctgcttaatctaaaaatcatatacaaaaattgccacgttctaatatccaatcccaaac

SEQ ID NO: 987 - DNA, 573 bp, Homo sapiens
aaagatgtgggagcaaaagctgacagagcagtccaacaccccgcttctcttgcctcttgctgcaagaatgtctgaggagtcttactttgaatctaaaacagaggagtcaaacagtgcagagatgtcatgtcagatcacagcaacaagtaacggggagggccatggcatgaacccaagtctgcaggccatgatgctgatgggctttggggatatcttctcaatgaacaaagcaggagctgtgatgcattctgggatgcagataaacatgcaagccaagcagaattcttccaaaaccacatctaagagaagggggaagaaagtcaacatggctctggggttcagtgattttgacttgtcagaaggtgacgatgatgatgatgatgacggtgaagaggaggataatgacatggataatagtgaatgaaagcagaaagcaaagtaataaaatcacaaatgtttggaaaacacaaaagtaacttgtttatctcaagtctgtacaaaaacagtaaggaggcagaaagccaagcactgcatttttaggccaatcacatttacatgaccgtaatttcttat

SEQ ID NO: 988 - DNA, 478 bp, Homo sapiens
ctgaaccctcgtggagccattcatacaggtccctaattaaggaacaagtgattatgctacctttgcacggttagggtaccgcggccgttaaacatgtgtcactgggcaggcggtgcctctaatactggtgatgctagaggtgatgtttttggtaaacaggcggggtaagatttgccgagttccttttactttttttaacctttccttatgagcatgcctgtgttgagttgacagtgagggtaataatgacttgttggttgattgtagatattgggctgttaattgtcagttcagtgttttaatctgacgcaggcttatgcggaggagaatgttttcatgttacttatactaacattagttcttctatagggtgatagattggtccaattgggtgtgaggagttcagttatatgtttgggattttttaggtagtgggtgtykagcttgaacgctttcttaattggtggctgcttttagg

SEQ ID NO: 989 - DNA, 398 bp, Homo sapiens
tggttccggccgcaccgtgtgggctgtagtagcgggaggggtgggggtcctccagagttaagtggctgtcctcgactgtgcccatacagcagccagctttcttccttaataactgcccgttcgaagagtgcgaggatgtccaagcggcactggttggacctaggggaggattacccctctggcaagaagcgtgcggggaccgatgggaaggatcgagatcgagaccgggatcgtgaagatcggtctaaagatcgagaccgagaacgtgatagaggagatagagagcgagagagggagaaagaaaaggagaaggagttgcgagcttcaacaaatgctatgcttatcagtgctggattaccacctttgaaagcttcccattcagctcactcaacccactc

SEQ ID NO: 990 - DNA, 328 bp, Homo sapiens
gtgctcgaccacagatatcctgtttggcccccgtcccagttttgttcagccttattctttaactaaacttccttgtgacttttgagaactcagctctggtactttttcatgccttgcaaaatggcgttactgcagctagcttgctaagccttatggtggggtctttcattcccccctctttctggaaactgaataaaatcttttattcacgcgattctacttcttctggatctattgatttgagttggtgatactgttgggtcagaaccagggcctgcaccaccgaaattctgtcttttacaaactggaccaagcggttgagaatgca

SEQ ID NO: 991 - DNA, 212 bp, Homo sapiens
ccaggttactaccagtgcaggagaattttcttcttaaattccagggaatcaaaatgtgtgggaaagagttcaataaggcttttgagctgtatgatcaggacggcaatggatacatagatgaaaatgaactggatgctttactgaaggatctgtgcgagaagaataaacaggatctggatattaataatattacaacatacaagaagaacata

SEQ ID NO: 992 - DNA, 165 bp, Homo sapiens
tttttttttttttttttttttttttttttttttttttttttttttttaggggaaaacccggtawtgatktcggggttgrgggataggaggaaaatgggggataggtgtwtraacatgagggggttttctcgkgkgaatgggggttttatgttgttaatggggggg

SEQ ID NO: 993 - DNA, 499 bp, Homo sapiens
cctgtcctctgggagtgacctttattagtccaccccttggagctagacatcctgtacttagtcacggggatggtggaagagggagaagaggaagggtgaagggaagggctctttgctagtatctccatatctagacgatggttttagatgataaccacaggtctacaagagcgtttttagtaaagtgcctgtgttcattgtggacaaagttattattttgcaacatctaagctttacgaatggggtgacaacttatgataaaaactagagctagtgaattagcctatttgtaaatacctttgttataattgataggatacatcttggacatggaattgttaagccacctctgagcagtgtatgtcaggacttgttcattaggttggcagcagaggggcagaaggaattatacaggtagagatgtatgcagatgtgtccatatatgtccatatttacattttgatagccattgatgtatgcatctcttggctgtactata

SEQ ID NO: 994 - DNA, 437 bp, Homo sapiens
ctgtaaaatgaaagttaccactccattctagtccttggatatcagtatattccccttcaccttccaccctattttcattgaaatttccagtatactttgccccatttgggaatgtgtaagtccccagtccatgaaacatattatccttaaattgtccttcatatactgctcctgaaaaatgctcaagtcttccaaaaccattcatcttgtcatctttccagcttcctgtgtagacaatcccattaggagtggtatgaatacctattccatttctctcgtagattccagaagatgttcttgtacagtcaccatcatacttgtctccatttggaaagataaagctgatcttatacacttctgaagttggccgagaggtgttagagagatcttccaaactctgcgactccccctgggcggccagctctgcggccgggaga

SEQ ID NO: 995 - DNA, 622 bp, Homo sapiens
aaataggtaagtactagctggtggtattttcctaaagccacagacatttagaataaatagagtgattacttttgaaaactttgatctgtattttgtttattaatagggcatgagtggttttgtctgtgctttttgcatgcatgaaaaacattacagacatgattactttcaagattcaatcctacccactgttaactttgtgcttaactaaactctgctaagatgtattagttaaaatattaatttgactacgtcttaggcaaaaaaaaggcataaaactagatacagacaacccatacatttatctctgattagtcacctatttctgggcttataataaatgataagccaaaagaaggctctccaaagctgggcaataactagttaatgctaatgagaagtccatctcaggtttcttactaaagaacctaatccataatgatttttctcactctgctgtgtattagataactagaaggagtatctaaattaaagattaatccgggacataggatatacagatattggtttattaacaatatttgattcgcactatataatttacagtgtttcttcttatgtaccattttatttagtacaacacaacctgttaggtagcagg

SEQ ID NO: 996 - DNA, 453 bp, Homo sapiens
cacacctaggtcggagcactgtcgtccttcagggctccagcctcttgatatttttgtacttcagtatcagctcgatagagcaaaagagagagaggacgagagaggggggtgaggagaaaagagagagagcgcgagagggagagggagagaaggaggggtgggaattacacaaagagagaaccaaaaataattttgattcctaagttaatttgctcactgatctgggattttagtcaccatggagggtaaatggacaatctgcccaggactgcagcccgatactatttttcaaagccagaacttactccattttctatgcaaatgtcagaaaaatgaaacaccctctctcccaagtcagagaaggggaagcaacggctctcacgttgggacaatattatctggaagctgaagaagaaactgaatactccttccttcctccccacccattccttt

SEQ ID NO: 997 - DNA, 534 bp, Homo sapiens; identical to SEQ ID NO: 675

SEQ ID NO: 998 - DNA, 509 bp, Homo sapiens
aaatcagtgtgtgtactgcagggaaaaggatataggaatactcatcttacaggggaatttgtgaccagaagatgtagtaacttcaatgactgaaagtcaatgctgatagtttactggcaacattaattgaagcatcaaaaataaatggcaaagagaaatcaggacaaaaaatctaattgctgtttgggaaaaaacttgattttgatgtttattctccaggtttttggttgttttttttctttcttctttcttaatgcctgaaattttctccattggcccgaaagcagtaaaaattgttcattaatcttccgttaggccaataaaagaagggcctcacaagacaaaacaggagccagaagtaaggactgaaggagaaggggagaatagctaatagctatagtatatgtatatgttaaaaactgaatatcccatcatcctatttcatgtatagttgagttctcaaatttgtaagtttttatacatcctttcattgaataaacgtttaatta

SEQ ID NO: 999 - DNA, 294 bp, Homo sapiens
ctggacagtagattacaaagcatctccgatcacgttaaggcagatgatcaatctgtggctgcatctgtaactcctcctgggaaaataatcctgttggagttgggggctcttcccagttgtctggttagttggcccaggaaggagcagtcctggagctggcgggtggggagccaggccccacctgtcttgtcactgctcgttctgctggccctctgtcactgatgctgatacggagccctggcccttgttgacatcactgatgcacacccactgccatcaactgactccttccac

SEQ ID NO: 1000 - DNA, 297 bp, Homo sapiens
ccacagaagttgctgctgacgctctgggtgaagaatggaagggttatgtggtccgaatcagtggtgggaacgacaaacaaggtttccccatgaagcagggtgtcttgacccatggccgtgtccgcctgctactgagtaaggggcattcctgttacagaccaaggagaactggagaaagaaagagaaaatcagttcgtggttgcattgtggatgcaaatctgagcgttctcaacttggttattgtaaaaaaaggagagaaggatattcctggactgactgatactacagtgcctcgcc

SEQ ID NO: 1001 - DNA, 566 bp, Homo sapiens
ctgtcctggctcaagttgcgggtgagaaacaaaaaagtaaattcaatccaatgacaaccaaactcccaactgcttctcacagcctttgctttatacatcctcagccaatccctcagtgagccccaacctccctatggcctctcaggcccaattagaggcaaataaacacttcctggcaggagtggaagacaagcaaactattaaatgctaaacaccccttcttccctctcaagcaggtcaaaaaggctgggcctggatcttgtaagaattggtttcctgcagtcaccttcccaacagcagtgctggggtgagctcacccatgtctgctggggactgaatgccacttctgttgcaggtctgcctcagtagatgctggggaccaatatagggccttcctacctagtctatgacttagaagggcagagggtgaggggaaaagggtcccatcagcagaggagagagagagatagagcccctcaaccctgcttcagttgcccatgtgctgtgtgcaactctactcaagagggcaaaagaggcaggtggaatatagcctggacaatctgatg

SEQ ID NO: 1002 - DNA, 450 bp, Homo sapiens
ctgccatgcccacagtgggtatcccagtctggtgacctgctggccggaaacaacttccttccacacaactgcagaatgtaactggtaaagaaacaatgccttccaagggtggccgacccccatcattgatgcggatcaagacgacatacgccctctcctcaaagtctgtgtgcctggtagacagtcgggcatgagtaccattgattttggaaacttcccagtcgttttgtaagcttccactgccgagggaaaatgtaaaatggggaccccgaaataagtgctgatcatcatcagtagcctcgaaaatgagacttccaggtgcactgaggggatggcagaagaacaagcccgtgtagtccttggctagcctgggagggttgtcattcacatccataaggatcaggtggaactctgacacagagcttaaggaagacccccctacttctgtgg

SEQ ID NO: 1003 - DNA, 418 bp, Homo sapiens
ccacaagtcttctacagtctccttagagagctctagaggggttggatggtcctatttatttatttattatttgttaaaagaagtgtagaatcagattttatatacaaatctgagagctggcataagagaatagatgacttgtaccctgaaatcttctgctgtcccaccttgactgccccaaacttggactgtctcagccttgccagggttatagtaggcaggtcacaggaagggaagctgaaggagaccttccagtgccactctaaccctgacttccaaataaggttaaagcacagcttcatgttatccagagcctgaaatgtcagccaacttcaccagcatgagaagtgcaatcaggcgacattatgcagcaacataaatacatcgctcagtaaaatggaaaactgtatagcaacaa

SEQ ID NO: 1004 - DNA, 477 bp, Homo sapiens
tgcggctgttaagacctgcaataatccagaatggctactctgatctatgttgataaggaaaatggagaaccaggcacccgtgtggttgctaaggatgggctgaagctggggtctggaccttcaatcaaagccttagatgggagatctcaagtttcaacaccacgttttggcaaaacgttcgatgccccaccagccttacctaaagctactagaaaggctttgggaactgtcaacagagctacagaaaagtctgtaaagaccaagggacccctcaaacaaaaacagccaagcttttctgccaaaaagatgactgagaagactgttaaagcaaaaagctctgttcctgcctcagatgatgcctatccagaaatagaaaaattctttcccttcaatcctctagactttgagagttttgacctgcctgaagagcaccagattgcgcacctccccttgagtggagtgcctctcatgatcctt

SEQ ID NO: 1005 - DNA, 597 bp, Homo sapiens
  misc_feature 487: n = A,T,C or G
ccaacatggtgagactccccccgatctctaaagaaaatacagaaattagctgggtgtggtggtgcgcatctgtaatcccagttacttgggaggctgaggcaggagaattacttgaatccggaaggcagaggttgcggtaagccaagatcgtaccacagcactctagcctgggcaacagagtgagactgcatcacccccaccccccaaaaaaataaatacacaaagtatacagtaacaacttttaacaaaataagattgaaaattagctttagaggctgggcacggtggctcacacctgcaatcccagcaccttgggaggccgaggcgggcggatcacctgaggtcgggagtttgagaccagcctgaccaacatggagaaaccccatctccactaaaaatacaaaatcagccaggcgtggtggcacatacctgcaatcccagctactcaggaggctgaggcaggacaatcacttgcacccgggaggtngaggttgcagtcagccgagactgcgccattgcactccagcctgggcaacaagagcaaaactccatctcaaaaaaaaaaagtggcttctgtaggatactcttattcaaaca

SEQ ID NO: 1006 - DNA, 503 bp, Homo sapiens
tttttttggtcatcaatttattaaaatagttgacttaagcatctgcaatggtgacttccacctcaactcctggctcaatactgatggaagtaatctgcttaacaatctcagaaggactgtgcaagtcaatgggtcgcttgtgaattctcatctggaaacgatcccacgtcttagaaccttcaccacaaggagtttttctcgtagtgattctcaaagtcttggtaggcattcgaactggtcctttcactttgagattcttttcttttgcgcctcttatcaagtcagcacacaccttttccaaggattttacgttgcggcttgttagggtgattcgaattcggtgaattgccacctccggctccacgggtgtttttccggtatccttaaaagccatggctgttgcgcgcgggcttcctgaccgacttgttcctcggcgagagcgaacagcggtgagtcaggagcaggagcgtgcggaccaaaaatcctcagcccttacgaccgsg

SEQ ID NO: 1007 - DNA, 446 bp, Homo sapiens
caaccgcttggtccagtttgtaaaagacagaatttcggtggtgcaggccctggttctgacccaacagtatcaccaactcaaatcaatagatccagaagaagtagaatcgcgtgaataaaagattttattcagtttccagaaagaggggggaatgaaagaccccaccataaggcttagcaagctagctgcagtaacgccattttgcaaggcatgaaaaagtaccaaagctgagttctcaaaagtcacaaggaagtttagttaaagaataaggctgaacaaaactgggacaggggccaaacaggatatctgtggtcgagcacctgggccccggctcagggccaagaacagatggtactcagataaagcgaaactagcaacagtttctggaaagtcccacctcagtttcaagttccccaaaagaccgggaaaaaccccaagccttattt

SEQ ID NO: 1008 - DNA, 432 bp, Homo sapiens
  misc_feature 402: n = A,T,C or G
cctcagggctgttctgtaagtagagctctaggaaaccttgccagtctttctcactagtaagcagggttgagactgtgggatcttccttcatggctgccatccacagtttcagttttggagtgtggtctacacactcatttaacttcattgcttccagccgttcaaaccagggccagatgaggtaatcaatcatagagatagaattgccaccaaagaaggtcgtcttcttattagtcagaacctgaacattaaacagcataaaagtatttcttacttgtgcatgtagtaagactcactagaaatgctgaagggaaataagtagagcaggtgagagaagcagtttttactccgatgtatccaagttgggtttttttctgatcaaaaagcttaattaagctttanaatctgttggtctgggatgaagtrgracaa

SEQ ID NO: 1009 - DNA, 466 bp, Homo sapiens
cctcaggacaaggaaacaggtatcagcatgatggtagcagaaaccttatcaccaaggtgcaggagctgacttcttccaaagagttgtggttccgggcagcggtcattgccgtgcccattgctggagggctgattttagtgttgcttattatgttggccctgaggatgcttcgaagtgaaaataagaggctgcaggatcagcggcaacagatgctctcccgtttgcactacagctttcacggacaccattccaaaaaggggcaggttgcaaagttagacttggaatgcatggtgccggtcagtgggcacgagaactgctgtctgacctgtgataaaatgagacaagcagacctcagcaacgataagatcctctcgcttgttcactggggcatgtacagtgggcacgggaagctggaattcgtatgacggagtcttatctgaactacacttactgaacagcttgaagg

SEQ ID NO: 1010 - DNA, 445 bp, Homo sapiens
cggccgaggtccattaaaagttatttacaacagtgggagaaaaaaagacaagaagttgtttcacattacagacctccccccaccccaaagcctaatacttgcttaccaagtcaaaaaagagacacagttgattcacaggctggaggtttgaacttgagtaagacatttataaaaacctagacggggcagtgtcctccccagcccaggtgccactaggcacagcacaagagactaaaaacaacaggggaaggctggacactcaaggtttgggagtataagcaccccacttctggctcagggatttggggagtagggtaaacaaaacctacttggaaaagaattggggaagaaaaccaacaactgccttatgcaggggtggggacagggaaggaggtagggccagggacaggagcatttcacatcactaacctaacttgggaagctg

SEQ ID NO: 1011 - DNA, 586 bp, Homo sapiens
gtgctcgaccacagatatcctgtttggcccctgtcccagttttgttcagccttattctttaactaaacttctttgtgacttttgagaactcagctctggtactttttcatgccttgcaaaatggcgttactgcagctagcttgctaagccttatggtggggtctttcattcccccctctttctggaaactgaataaaatcttttattcacgcgattctacttcttctggatctattgatttgagttggtgatactgttgggtcagaaccagggcctgcaccaccgaaattctgtcttttacaaactggaccaagcggttgagaatgcagggtccgaggagtaggattaataaaagtactatcagagggcccataatggtggatatcagggtcgtgaaccatggggacctgttaaacagtccctcaaaccacccttgtcctgattcgaacmatttttgcctctggtttagcctttctcttagcttagccatgctatcccttactacgccagtgtggtctgcatagaaacagcattcttcttttagggcagcacataatcctccttcttttaggaacagcagatctaa

SEQ ID NO: 1012 - DNA, 586 bp, Homo sapiens
aaaaacaggacacgtactgtatgagtaaacagcgtggctaacaccaagtccacactggtaagcttttgagaaccatttacactatgttgacagtagtactgctgcaggcagacagcggaagaataaataatagtgcttcaagaagagtagtgattgagaggataggtaaagagggcgcctcatcgtggaagctagagcaggaacacctccccagtagtgacatgtgcaaagttccagatctccacgacaaagacagctcaacccactggaacaaacagactcccaatgtggctggcaactgcgggggtagaagaactcaggcaaagtaggcacaggaatgggggagatgagagccaagggacaaacgccgagaaagcgttccgacaagcatgtgtgttcatacatgcatacccccaacaaagggcaatgcactgtgtaacagaactgaacacaatttaacaaagctgctcccagccttcctgtcacctctttggcagtagagcaggccatctcaacttcggacacacaaagacattctcttcaggaggaaggctgtccgcaaactcagagtaggtgctggcaacag

SEQ ID NO: 1013 - DNA, 588 bp, Homo sapiens
ccaagatggtctcgatctcttgacctcgtgatctgccttcctcggcctcccaaagtgctggaattacaggtgtgagccactgcgccaggccgatcggcaattcttaatcccagtactttgggaggctgaagtgtgaggactgcttgagcacaggagttcgagaccagcctgggcaatatagtgagactctgtctctaaaacctaataaaattagcctggcattgtggcatacgcctgtaatcccagctactcaggaggctaaggtaggaggaatgcccgagcccaggaagtcaaggctgcagtgagcctgatcataccatcattcactccagcctgagtgacagagtgagactgtctaaaaaaaaaaaaaaaaaargaargaaagaaagaaagaaaactatcattgggaggagcatttactatctgtaatctgtgctcctcctgctcctttttccattaacatggaaaaaggaatatacgtttctgttgctttgattttgtataggcataacaacagtaactcaccttaagtatttggagagtacattaatagcatccatggkgtctttgttttccttatatagtacg

SEQ ID NO: 1014 - DNA, 440 bp, Homo sapiens
aaatcatctttatttacaaaatactatcctgagaattataattccattaagcttcaatttgagcaaaagtgtaatcacttaagtaacagcagttacttaaactgaaaatgagatcagtcaaaattacttttgaagagagcaaaaatattgtcaggtttcttgctgtggttctggatgttcagtagcaggctcatttgaaggtggaatcaaacctgaggggaactcacttctaccttcagaatgtgggggtggggggaaaaatccaggtcttgggggaaggtaaggaggaaaacccctcggtggatagacatttctcattgcaaatggagcaggtggtggacctgggaaatcccctggtggaaaataatctcgagaagctccaaacatggctcctggaggaggtggggggaaaggaggtcctcttctcaagaatgggcctc

SEQ ID NO: 1015 - DNA, 484 bp, Homo sapiens; identical to SEQ ID NO: 817

SEQ ID NO: 1016 - DNA, 511 bp, Homo sapiens
ctggaacgtcagcccagcgagccgaactgatcgcactcacccaagccctgaaaatggcagaaggtaagaagctaaatgtttacactgatagccgctatgccttcgctacggcccatgttcatggggaaatatataggagacgggggttgctgacctcagaaggcaaggaaatcaagaacaaaagcgagatcctagccttgctgaaagccctctttttgccaaagagactcagtattatccattgcccaggacatcagaaaggagacagtgccgaagccagaggcaaccgtatggcagaccaggcggcccgagaggcagccacaaaaacagttccagaagcctctacactccttatagaggactcgaccccgtacacgcctgcctatctccattacaccgaaacagatctaaaaagattgcgagaactgggggccacctataatcagataaaaggatattgggtcctacaaggcaagccggtgatgcccgatcagtttgtgtttgaattatt

SEQ ID NO: 1017 - DNA, 489 bp, Homo sapiens
gccgccgcttgtgctgcagccatgtctctagtgatccctgaaaagttccagcatattttgcgagtactcaacaccaacatcgatgggcggcggaaaatagcctttgccatcactgccattaagggtgtgggccgaagatatgctcatgtggtgttgaggaaagtagacattgacctcaccaagagggcgggagaactcactgaggatgaggtggaacgtgtgatcaccattatgcagaatccacgccagtacaagatcccagactggttcttgaacagacagaaggatgtaaaggatggaaaatacagccaggtcctagccaatggtctggacaacaagctccgtgaagacctggagcgactgaagaagattcgggcccatagagggctgcgtcacttctggggccttcgtgtccgaggccagcacaccaagaccactggccgccgtggccgcaccgtgggtgtgtccaagaagaaataagtctgtagg

SEQ ID NO: 1018 - DNA, 440 bp, Homo sapiens
aaaatagaagtacacctaattgttattggttaaaaaaaaagccatatgtgaatgaggttggtttttgggttttttctttcctgaattgtattagtccaaaagaactaaattagggtacttgtgctgtaccaaaatggtaattataacagacagtattagaattactgaattaacaatgagaaagagagaagtgtatctgttacgtggatatatgggccagcctggatatacaacagagtagtaacctgtgaaacaaacatagaatatcctcttagacattgttcctcataatgcactgacagaattcacatagctcttaatgaaacaatttaagattgatgtacgtacgtttgacttggtctcgctgtcggttaactgtaaagttagggggaagaaagaaaaaaaattaaaagggtagacacagttgagagttttatttt

SEQ ID NO: 1019 - DNA, 453 bp, Homo sapiens
aaagaaagatttaataaagagttaaatatcaaatagacaacttcacttctaaatttcactttgtcactcacactgaattggaattgaacaatggctctctcttcaggcggtcctgtactggaaattctggaaactggtaaaatatattttgataagagtttcaagttaatgacctatttccatgcagtacctaatgctgcctttagatgaagtcacattcagtctgctttgaaatgaaatagctttaagtaatctgttctgccaggctagaaaaatgtcaccaacattttgctgatgcatggagatgtggcagtaataaactactatttagagaggaagagaattggagcagaagtgactgggcaacagtttcaagagaagcaaaagccgggagagggaaatcaatgaaaacatgcacaagattaggcagagtaatatgcacaattagtgcag

SEQ ID NO: 1020 - DNA, 551 bp, Homo sapiens
  misc_feature 517: n = A,T,C or G
aaataaggcttggggtttttcccggtcttttggggaacttgaaactgaggtgggactttccagaaactgttgctaatttcgctttatctgagtaccatctgttcttggccctgagccggggcccaggtgctcgaccacagatatcctgtttggcccctgtcccagttttgttcagccttattctttaactaaacttctttgtgacttttgagaactcagctctggtactttttcatgccttgcaaaatggcgttactgcagctagcttgctaagccttatggtggggtctttcattcccccctctttctggaaactgaataaaatcttttattcacgcgattctacttcttctggatctattgatttgagttggtgatactgttgggtcagaaccagggcctgcaccaccgaaattctgtcttttacaaactggaccaagcggttgagaatgcagggtccgaggagtaggattaataaaagtactatcagagggcccataatggtggatatcagggntggtgaaccaaggggacttattaaacagcccttt

SEQ ID NO: 1021 - DNA, 389 bp, Homo sapiens
aaataaggcttggggtttttcccggtcttttggggaacttgaaactgaggtgggactttccagaaactgttgctagtttcgctttatctgagtaccatctgttcttggccctgagccggggcccaggtgctcgaccacagatatcctgtttggcccctgtcccagttttgttcagccttattctttaactaaacttctttgtgacttttgagaactcagctctggtactttttcatgccttgcaaaatggcgttactgcagctagcttgctaagccttatggtggggtctttcattcccccctctttctggaaactgaataaaatcttttattcacgcgattctacttcttctggatctattgatttgagttggtgatactgttgggtc

SEQ ID NO: 1022 - DNA, 333 bp, Homo sapiens
aaaaatgccttaattttcaacttcatgcaaactaaataaagatgaccaaaacaaaagcttaaacaatggaaggatatttcacagaaaatttcttatacaaaaaaacacataagaaaaagggccactaggtgacattttaatttacaaattggcatcattttggtcgacaaatacccacatgctgttttcctctgctaacgagttgcagagaaaaaaaacagcatgaatttggattttaatcacacatttcttctggaatctcatgtggattaaagatgccagggacagacatttgacgtttatgtttctcttcatcagcctgccgtagggcta

SEQ ID NO: 1023 - DNA, 578 bp, Homo sapiens
cctcctcagacactctcaagaggatggggagatgacatcacttgggtacaaacttatgaagaaggtctcttttatgctcaaaaaagtaagaagccattaatggttattcatcacctggaggattgtcaatactctcaagcactaaagaaagtatttgcccaaaatgaagaaatacaagaaatggctcagaataagttcatcatgctaaaccttatgcatgaaaccactgataagaatttatcacctgatgggcaatatgtgcctagaatcatgtttgtagacccttctttaacagttagagctgacatagctggaagatactctaacagattgtacacatatgagcctcgggatttacccctattgatagaaaacatgaagaaagcattaagacttattcagtcagagctataagagatgatggaaaaaagccttcacttcaaagaagtcaaatttcatgaagaaaacctctggcacattgacaaatactaaatgtgcaagtatatagattttgtaatattactatttagtttttttaatgtgtttgcaatagtcttattaaaataaatgttttttwy

SEQ ID NO: 1024 - DNA, 521 bp, Homo sapiens
aaataaggcttggggtttttcccggtcttttggggaacttgaaactgaggtgggactttccagaaactgttgctagtttcgctttatctgagtaccatctgttcttggtcctgagccggggcccaggtgctcgaccacagatatcctgtttggcccctgtcccagttttgttcagccttattctttaactaaactttcttgtgacttttgagaactcagctctggtactttttcatgccttgcaaaatggcgttactgcagctagcttgctaagccttatggtggggtctttcattcccccctctttctggaaactgaataaaatcttttattcacgcgattctacttcttctggatctattgatttgagttggtgatactgttgggtcagaaccagggcctgcaccaccgaaattctgtcttttacaaactggaccaagcggttgagaatgcagggtccgaggagtaggattaataaaagtactatcagagggcccataatggtggatatcagggtcgtg

SEQ ID NO: 1025 - DNA, 521 bp, Homo sapiens
cgtctcccttcagtcgccatcatgattatctaccgggacctcatcagccacgatgagatgttctccgacatctacaagatccgggagatcgcggacgggttgtgcctggaggtggaggggaagatggtcagtaggacagaaggtaacattgatgactcgctcattggtggaaatgcctccgctgaaggccccgagggcgaaggtaccgaaagcacagtaatcactggtgtcgatattgtcatgaaccatcacctgcaggaaacaagtttcacaaaagaagtctacaagaagtacatcaaagattacatgaaatcaatcaaagggaaacttgaagaacagagaccagaaagagtaaaaccttttatgacaggggctgcagaacaaatcaagcacatccttgctaatttcaaaaactaccagttctttattggtgaaaacatgaatccagatggcatggttgctctattggactaccgtgaggatggtgtgaccccatatatgattttctttaaggatggttt

SEQ ID NO: 1026 - DNA, 380 bp, Homo sapiens
aaaaagaaaaaggacagatccattaatgaggtaatgaattattgcctttatgttgggatagaccagggccaggtagaaaagaatgaaagagaaagacagggagagggagagagagagagaggagaaagtgagctcagcgaattggccgggtgacacactgatgaaggggtcaaaggacactctgagttagtgccctcgggacacacagcgaacagtgatcacgaaaagagtgggctcaataattttccataaacttgctcaagattccatgcagttgccatacagcctttgaggtatggtcaacctatagtaagtgagtaaatgataaggggaggaagaaatggaaacctaaacatctactgcaatgaaaaccaacagca

SEQ ID NO: 1027 - DNA, 433 bp, Homo sapiens
aaaatccctcaaaaactgtttattatacaagtgagttttgagtcacgatgggcttatcggtaggatttctggtagcgagcgcgggcaccagggcctccaaactttttggactcgcagcgacgagggtcagctaccagcagggtccggtcatactggatgaggatgtctttgatctccttcttggaagcctcatccacatatttctggtaataggccaccagggctttggagatggactgacggatagcataaatctgggccacgtgaccaccaccctttacacggacacggatgtctacaccagcaaatcgctccttgccgagaagcagaactggctccagcagcttgtgctgtagcgtgcgcggctcaatcatctccaggggccgcccgttcaccttgatgagaccattgccgcgtttgcagtgcgccacag

SEQ ID NO: 1028 - DNA, 560 bp, Homo sapiens
aaacgaagagagtggaagagcattttgttggatatggctactcgtccagcaggccaaaaccttcaaggaatagaagataaaatcacaaaaatgaaggttactatggtagcttgggatcgacatgacaatacagttataactgcagttaataacatgactctgaaagtttggaattcttacactggtcaactaattcatgtcctgatgggtcatgaagatgaggtatttgttcttgaaccacacccgttcgatcctagagttctcttttctgctggtcatgatggaaacgtgatagtgtgggatctggcaagaggagtcaaaatacgatcttatttcaatatgattgaaggccaaggacatggcgcagtatttgactgcaaatgctctcctgatggtcagcattttgcatgcacagactctcatggacatcttttaatttttggctttgggtccagtagcaaatatgacaagatagcagatcagatgttctttcatagtgattatcggccacttattcgtgatgccaacaattttgtattagatgaacagactcagcaagc

SEQ ID NO: 1029 - DNA, 495 bp, Homo sapiens
ccaggtatcagtcgttcctggattgcttgtgggtctccaaggccaacaccaggacaaccatttggcctcatgtgcccagtcaattcccttggtgccgaggacatgcctataaatggacgagactgctgcatgtttctggggcccatattcctctgtccgattcccatggcaccagggggctggtgagatggctgaggatggggcatatttggataactgccaacttccattggtatcccagcacttcccggcctgacttgtggaggaggagtgcctgctggattactcattgctttcatgggtgacatgggaggtggagaggcataagttccctgaggctgtgaaggatgcatagtttgtgtgttcatttggttaagtgagccactggggtggatgggctgctggtgcattagtccttgaccactgtttgatgggaatcctacagcattggggtatcttggtacggactgattcattggagtattatttgtaagg

SEQ ID NO: 1030 - DNA, 503 bp, Homo sapiens
aaaaggaaaagataccaaatgcctgctgctaccacccttttcaattgctatcttttgaaaggcaccagtatgtgttttagattgatttccctgtttcagggaaatcacggacagtagtttcagttctgatggtataagcaaaacaaataaaacgtttataaaagttgtatcttgaaacactggtgttcaacagctagcagcttatgtgattcaccccatgccacgttagtgtcacaaattttatggtttatctccagcaacatttctctagtacttgcacttattatcttttgtctaatttaaccttaactgaattctccgtttctcctggaggcatttatattcagtgataattccttcccttagatgcatagggagagtctctaaatttgatggaaatggacacttgagtagtgacttagccttatgtactctgttggaatttgtgctagcagtttgagcactagttctgtgtgcctatgaagttaatgctgcttattgtc

SEQ ID NO: 1031 - DNA, 496 bp, Homo sapiens
aaagctgtggaaaagctttattatagattttagtacagaattaaaaaagttcaaacaataattgtttggaaccacaaataattaaaaggaaacacagcaatcccataaacaagcattctggcatctgttagaaattttccctcaaattatgaaatgtagctctccatgctttccaatgattgttataatacccacaaatatctgtgatttcagtggaatactttaacaaaagttttctttttaaggcatgatcctgattcattttttcttcaatatctcagtcatttcaggaactaccttaaataaatctgcaactattccataatctgccacttggaaaattggagcttctgggtctttattaattgccacaattgtctgtgaaataaaaacaaagagtttgacttttaccaagaaaacatttcacacagactgatagttctattttaacttcccttacaatatattaatattcttaaaatgtctaccaaataag

SEQ ID NO: 1032 - DNA, 481 bp, Homo sapiens
cttggctgtctgaagatagatcgccatcatgaacgacaccgtaactatccgcactagaaagttcatgaccaaccgactacttcagaggaaacaaatggtcattgatgtccttcaccccgggaaggcgacagtgcctaagacagaaattcgggaaaaactagccaaaatgtacaagaccacaccggatgtcatctttgtatttggattcagaactcattttggtggtggcaagacaactggctttggcatgatttatgattccctggattatgcaaagaaaaatgaacccaaacatagacttgcaagacatggcctgtatgagaagaaaaagacctcaagaaagcaacgaaaggaacgcaagaacagaatgaagaaagtcagggggactgcaaaggccaatgttggtgctggcaaaaagaagtgagctggagattggatcacagccgaaggagtaaaggtgctgcaatgatgttagctgtgg

SEQ ID NO: 1033 - DNA, 478 bp, Homo sapiens; identical to SEQ ID NO: 984

SEQ ID NO: 1034 - DNA, 512 bp, Homo sapiens
ctgaagaagttgcagctcgccttgcacaacaggaaaaacaagaacaagttaaaattgagtctctagccaagagcttagaagatgctctgaggcaaactgcaagtgtcactctgcaggctattgcagctcagaatgctgcggtccaggctgtcaatgcacactccaacatattgaaagccgccatggacaattctgagattgcaggcgagaagaaatctgctcagtggcgcacagtggagggtgtattgaaggaacgcagaaaggcagtagatgaagctgccgatgcccttctcaaagccaaagaagagttagagaagatgaaaagtgtgattgaaaatgcaaagaaaaaagaggttgctggggccaagcctcatataactgctgcagagggtaaacttcacaacatgatagttgatctggataatgtggtcaaaaaggtccaagcagctcagtctgaggctaaggttgtatctcagtatcatgagctggtggtccaagctcgggatgacttt

SEQ ID NO: 1035 - DNA, 381 bp, Homo sapiens
ctgttcacatcttttagcattttacatttgcctaacttaaaaattgtcatgtgtcaaaatcatggttttgtaattgctaaggcatgatatgtcaggttatttgaatataattactttttgaagtaattgtgaccacaaaacatctttttacatgaaggagctgtgtatcatttgaaattactcaaatgatgtcttgctctgaggcataaatcccaggtacttagtgtttttaataatatggtgccactgcaggatttgggggcggtggggaagaacaagcataatggtagggggaggcttggcctgaaactaaccactgagtgaattgcactgcaggttttacttaacgggaattccttatttgggatgtcgagagggcag

SEQ ID NO: 1036 - DNA, 477 bp, Homo sapiens
aaatgtcatcgatctaatggaaccaacacttcagctcctcaggacatttatgcggtaaatggaatcgcgttccatcctgttcatggcacccttgcaactgtgggatctgatggtagattcagcttctgggacaaagatgccagaacaaaactaaaaacttcggaacagttagatcagcccatctcagcttgctgtttcaatcacaatggaaacatatttgcatacgcttccagctacgactggtcaaagggacatgaattttataatccccagaaaaaaaattacattttcctgcgtaatgcagccgaagagctaaagcccaggaataagaagtagtggctggagactctggctcagccagagttgtttctctccactctgcctcatctctgtacgaatttgggtcccagccttgttgggttgtcagccatggacatggatttcaacccctggagaaacgatgtcattgttcagcag

SEQ ID NO: 1037 - DNA, 544 bp, Homo sapiens
ccatgttagctgggtcgggaagacatccatggaagtgaagatgcaaatgttccagttacatggtgatgaattttgtcctgttttggatgcaacatttgtaatggtggctcgtgattctgaaaataaagggccggcatttgtaaatccactcatccctgaaagcccagaggaagaggagctctttagacaaggggaattgaacaaggggagaagaattgccttcagctccacgtcgttactgaaaatggcccccagcgctgaggagaggaccaccatacatgagatgtttctcagcacactggatccaaagactataagttttcggagtcgagttttaccctctaatgcagtgtggatggagaattcaaaactgaagagtttggaaatttgccaccctcaggagcggaacattttcaatcggatctttggtggtttccttatgaggaaggcatatgaacttgcgtgggctactgcttgtagctttggtggttctcgaccgtttgtggtagcagtagatgacatcatgtttcaraaacctgttgag

SEQ ID NO: 1038 - DNA, 498 bp, Homo sapiens
  misc_feature 429: n = A,T,C or G
ctgccatgtaccaggccaccaggatttttgcctctaacctgaaggaacgcatggcccagcgcttctacaaccttgtcctgctccctcgagtacgagatgacgttgctgaatacaaacgactcaacttccatctctacatggctctcaagaaggcccttttcaaacctggagcctggttcaaagggatcctgattccactgtgcgagtctggcacttgtaccctccgggaagccatcattgtgggtagcatcatcaccaagtgctccatccctgtgttgcactccagtgcggccatgctgaaaattgctgagatggaatacagcggtgccaacagcatcttcctgcgactgctgctggataagaagtatgcactgccttaccgggtgctggatgccctagtcttccacttcctggggttccggacagagnagcgtgaactgcctgtgctgtggcaccagtgcctcctgactttggtccagcgctacaaggccgacttgg

SEQ ID NO: 1039 - DNA, 522 bp, Homo sapiens
cttggtgagggcaggagcctcggtacaacgtgacagccctcaccaggtcttcaatgtcacttggagagttaccaacctaatgacaggacaaacagctaacgctacctccctcctggggacgatgacagacaccttccctaaactatattttgacttgtgtgatttagttggagaccattgggatgacccagaacccgatattggagatggttgccgctctccggggggaagaaaaaggacaagactgtatgacttctatgtttgccccggtcatactgtaccaatagggtgtggagggccgggagagggctactgtggcaaatggggatgtgagaccactggacaggcatactggaagccatcatcatcatgggacctaatttcccttaagcgaggaaacactcctaaggatcagggcccctgttatgattcctcggtctccagtggcgtccagggtgccacaccggggagtcgatgcaaccccctagtcttagaattcactgacgcgggtaaaaaggccag

SEQ ID NO: 1040 - DNA, 499 bp, Homo sapiens
  misc_feature 494: n = A,T,C or G
ctgtagtaagttgataatcctaaaaagccttggctattcatcagacatttgttaagcacagtggacagacatttcttaagcattgtgctagatattaaggatacagatataaagagtccagtctctaccttcctggtctcacttctactcgagaagaaatagacatgtatacagctacttacagcagtgcgataaatgtaagaaaggcatgtacagtgtgtgttatagggatataaaaaggggccacttaactccacctggagagttcagggaagccttcccagaacgggcaaaatttgaactaattcttgaagtttaagaaggaattttccagcagtacagagaggggagggggccttccaggcataggatttctagattcagaagctaaggaaagtttggcttttacttaaggaattggtaaattgttcagaatggatcgtgcacagggttgtaatacaaatggtaaggggtaaggctagagacgtgagctngggca

SEQ ID NO: 1041 - DNA, 581 bp, Homo sapiens
aaatacagagtcaaaagatgatttataaaatataaaacattttctgcttggccgtatttgaagacaagctgaatacatatctatgttctgaataagtccactatggatatatataggaagagatatacatatatccatccacagatacacacacacatatatatttctgcatgtatatatacataattctttctatagttacaggaaatacttcttctataattctgattttgactcccatcctccaccatttactcatccactcattacctaaatcttggctttctttcctatattgtaaataatccatccaaacttctagccagtactgtcaggagggttcttgctcgagtgagctgttaatactattttccactgacaacttctgcacatcgaggacacagtgtatctgaagactccgctgtatacttccaacaacgggggcatttttctttcgtagtcggcatgacaattactttataggaagactcttcacgaatatcaccaccttctaagttgatgaggaatttccctttaagctcgattacatctgcagtcatctctcgtggttcctgagccag

SEQ ID NO: 1042 - DNA, 550 bp, Homo sapiens
ccactacatcgcccacgtgaaagatccacagtctggtgaatggtataagtttaatgatgaggacatagaaaagatggaggggaagaaattacaactagggattgaggaagatctagcagaaccttctaagtctcagacacgtaaacccaagtgtggcaaaggaactcattgctctcgaaatgcatatatgttggtttatagactgcaaactcaagaaaagcccaacactactgttcaagttccagcctttcttcaagagctggtggatcgggataattccaaatttgaggagtggtgtattgaaatggctgagatgcgtaagcaaagtgtggataaaggaaaagcaaaacacgaagaggttaaggagctgtaccaaaggttacctgctggagctgagccctatgagtttgtccctctggaatggctgcaaaagtggttggatgaatcaacacctaccaaacctattgataatcacgcttgcctgtgttcccatgacaagcttcacccggataaaatatcaattatgaagaggatatctgaatatgcagac

SEQ ID NO: 1043 - DNA, 523 bp, Homo sapiens
ccaaaactaagttttaattataataggaaaactaatgcgaggccagaaattgttgactttgttcacagaatgctaattttccccagacaaaatatgcagagctatgtttcattaatatgcagatctatgttttattaccaaaacacactattgccaaatgcacaaaaggaaaaaagatatttgtaccctgtgctaaaacagattcatttgtggtatttatatgacaaaactggaattatttcaacctggaaatcattgtttcaaatttccatggttaaaggtttgctcaagcaaatcttaaaacacaggtatgtatttcagaagatcaaccaaattcaagtttgcatcccattttgggtaccttgtaaatagaaatttcaaaatcttcctcaaaaatgtctgcatttgttttccagattcttgcaacccaaacaaaacttcacagaaactctgcacaagagttggtagacagctaaaccttctctaaattgagttatggacaataaggtcttgattatagcag

SEQ ID NO: 1044 - DNA, 480 bp, Homo sapiens
cagcaagtactatgtgactatcattgatgccccaggacacagagactttatcaaaaacatgattacagggacatctcaggctgactgtgcytgwcctgattgttgctgctggtgttggtgaatttgaagctggtatmtccaagaatgggcagacccgakagcatgcccttctggcttacacactgggtgtgaaacaactaattgtcggtgttaacaaaatggattccactgagccaccctacagccagaagagatatgaggaaattgttaaggaagtcagcacttacattaataaaattggctacaaccccgacacagtagcatttgtgccaatttctggttggaatggtgacaacatgctggagccaagtgctaacatgccttggttcaagggatggaaagtcacccgtaaggatggcaatgccagtggaaccacgctgcttgaggctctggactgcatcctaccaccaactcgtccaa

SEQ ID NO: 1045 - DNA, 523 bp, Homo sapiens
gttaggtgccgctgttgctgctcgtgttgaatctagaaccgtagccagacatgggactggaggacgagcaaaagatgcttaccgaatccggagatcctgaggaggaggaagaggaagaggaggaattagtggatcccctaacaacagtgagagagcaatgcgagcagttggagaaatgtgtaaaggcccgggagcggctagagctctgtgatgagcgtgtatcctctcgatcacatacagaagaggattgcacggaggagctctttgacttcttgcatgcgagggaccattgcgtggcccacaaactctttaacaacttgaaataaatgtgtggacttaattcaccccagtcttcatcatctgggcatcagaatatttccttatggttttggatgtaccatttgtttcttatttgtgtaactgtaagttcacatgaacctcatgggtttggcttaggctggtagcttctatgtaattcgcaatgattccatctaaataaaagttctatgatctccaaaaaaaa

SEQ ID NO: 1046 - DNA, 488 bp, Homo sapiens
aaagaatcagcaaaatttcaaataaaaaattatgaaaatattatcctcattagttcatttagtcccatgaaattaattattttctctgcttgatcttggtggacagtttcatgaagctgtcagttagttcattaaagttttggaaattctcagacagtgcagtggtatcagaaacttgtattcaagagtacaggtcagagtcttcttttcttttctttttgagatggagtcttgctctgttgccagactggagtgcagtggtgcgatctgggctcactgcaatctccacctcccgggttcaagcgattctcctgcctcagcctcccgagtaactgggactacaggtgcgcgccaccaagcccagctcatttttgtatttttagtagagatggggtttcacgatgttggctaggatggtctcgatctctggtcagagtcttttctgtaaatatccttggtaaagaagcaattttagactgtagctgttg

SEQ ID NO: 1047 - DNA, 540 bp, Homo sapiens
ctggcctcagcccgccacatcaccctgacctgcttacgcccagattttcttcaatcacatctgaataaatcacttgaagaaagcttatagcttcattgcaccatgtgtggcatttgggcgctgtttggcagtgatgattgcctttctgttcagtgtctgagtgctatgaagattgcacacagaggtccagatgcattccgttttgagaatgtcaatggatacaccaactgctgctttggatttcaccggttggcggtagttgacccgctgtttggaatgcagccaattcgagtgaagaaatatccgtatttgtggctctgttacaatggtgaaatctacaaccataagaagatgcaacagcattttgaatttgaataccagaccaaagtggatggtgagataatccttcatctttatgacaaaggaggaattgagcaaacaatttgtatgttggatggtgtgtttgcatttgttttactggatactgccaataagaaagtgttcctgggtagagatacatatggagtcagacctttgttt

SEQ ID NO: 1048 - DNA, 586 bp, Homo sapiens
  misc_feature 530: n = A,T,C or G
aaaaaacaccttttataggtggatccagcagtctggcaacgcccacagttaccacaacacagaaaactgatcgtgctataaaatggacgctaaactatgaaaacagtgtgacattgttctctgttcttccagagccagtaacatgcttgctcgtgctttctacttctagctgatcattcttttcccaacatatatttacaaatttaccaaattttacctagaattttaggaccaaatggttctcactctttatgctgcaaagacctggatgatgtttggtaactatagaaaaatagaaattacactcaggatcactgttactgctattgccactgatgattcctgcaaaaatataatcgaagttttccatcaaatgtataatatgctattaatacacattagatgataacagttgttccatgaatgattctatgaagctatgcatcttagacctcttgagctgtgaattagcactattttctatagttacttattctctggatcattttataatttccatattaatttcnaatatgctcgtgttattcttcagtgatttccacaattgtgcatttattctttggtt

SEQ ID NO: 1049 - DNA, 434 bp, Homo sapiens
cctgggctgggaaaaactttggaaccagactcttgcctgtttcccaggcccactgtgcctcagagaccagggctccagcccctcttggagaagtctcagctaagctcacgtcctgagaaagctcaaaggtttggaaggagcagaaaacccttgggccagaagtaccagactagatggacctgcctgcataggagtttggaggaagttggagttttgtttcctctgttcaaagctgcctgtccctaccccatggtgctaggaagaggagtggggtggtgtcagaccctggaggccccaaccctgtcctcccgagctcctcttccatgctgtgcgcccagggctgggaggaaggacttccctgtgtagtttgtgctgtaaagagttgctttttgtttatttaatgctgtggcatgggtgaagaggaggggaagagg

SEQ ID NO: 1050 - DNA, 475 bp, Homo sapiens
ctggctcgggctgacgactatgaacaggtcaagaacgtggccgattactacccggagtacaagctgctcttcgagggtgcaggtagcaaccctggagacaagacgctggaggaccgattctttgagcacgaggtaaagctgaacaagttggccttcctgaaccagttccactttggtgtcttctatgccttcgtgaagctcaaggagcaggagtgtcgcaacatcgtgtggatcgctgaatgtatcgcccagcgccaccgcgccaaaatcgacaactacatccctatcttctagcgtcctggcccaaggctctcaattgcactctttgtgtgtgtgtgtgtgtgtgtgcgcgtgtgtgtgcgtgtgtgtgtatgtggtctgtgacaagcctgtggctcacctgcctgtccggggtgtagtacgctgtcctagcggctgcccagttctcctgaccctcttagagactgttcttagg

SEQ ID NO: 1051 - DNA, 468 bp, Homo sapiens
ccaacatggtgaaagcccatctctactagaaatataaaaattagccgggcgtggtggcatgtgcctgtggtcgcagctacttgggaggctaagacaggagaattgcttgggcctgggaggtggaggttgcagtgggctgggatcgcgccactgcactccagcctgggcaacagtgggacaccgtctcaaaggaaaaaaaggttaggaatcacaaattgtgtaaatatatagcaactttaagaagagagaagaatgcttataacctagtgaatatttctgctgagccttagttgtcttgtctaaaggaaaaaagagggaattgtagaataaaagtatttgttagtggaaattattgacctgaaaccatatcatattgttagtgtaactgaatgtatcagaaattgttcctatgtaggtattctgtgaaactggtttctaaaatgttacaggaaactgtttccttttttt

SEQ ID NO: 1052 - DNA, 480 bp, Homo sapiens
aaatggtattacgtataaattaatataaaatgattacctctggtgttgacaggtttgaacttgcacttcttaaggaacagccataatcctctgaatgatgcattaattactgactgtcctagtacattggaagcttttgtttataggaacttgtagggctcattttggtttcattgaaacagtatctaattataaattagctgtagatatcaggtgcttctgatgaagtgaaaatgtatatctgactagtgggaaacttcatgggtttcctcatctgtcatgtcgatgattatatatggatacatttacaaaaataaaaagcgggaattttcccttcgcttgaatattatccctgtatattgcatgaatgagagatttcccatatttccatcagagtaataaatatacttgctttaattcttaagcataagtaaacatgatataaaaatatatgctgaattacttgtgaagaatgcattt

SEQ ID NO: 1053 - DNA, 435 bp, Homo sapiens
ctgaaccctcgtggagccattcatacaggtccctaattaaggaacaagtgattatgctacctttgcacggttagggtaccgcggccgttaaacatgtgtcactgggcaggcggtgcctctaatactggtgatgctagaggtgatgtttttggtaaacaggcggggtaagatttgccgagttccttttactttttttaacctttccttatgagcatgcctgtgttgggttgacagtgagggtaataatgacttgttggttgattgtagatattgggctgttaattgtcagttcagtgttttaatctgacgcaggcttatgcggaggagaatgttttcatgttacttatactaacattagttcttctatagggtgatagattggtccaattgggtgtgaggagttcagttatatgtttgggattttttaggtagtgg

SEQ ID NO: 1054 - DNA, 376 bp, Homo sapiens
ctgatatctcctggtgctatccccaaactgccactctaaactcttgaagtaaataaataatctttgctggcaggactctgctgaatctccttaggcactctctaatcagatatcctaggtcctcccaattcttagaccttttatacctgttttttctccttctgttattccatttagtttctcaattcatccaaaaccgtatccaggccatcaccaatcattctatatgacaaatgtttcttcttacatccccacaatatcaccctttaccacaagacctcccttcagcttaatctctcccactctaggttcccacgctgcccctaatcccacttgaagcagccctgagaaacatcgcccattctctctccctacc

SEQ ID NO: 1055 - DNA, 326 bp, Homo sapiens
gggggttgttagggggtcgaggtcttggtgagtgttttagtggggttagcgatggaagtaggattggtgctgtgggtgaaagagtatgatggggtggtggttgtggtaaactttaatagtgtaggaagctgaataatttatgaaggagaggggtcagggttgattcgggaggatcctattggtgcgggggctttgtatgattatgggcgttgattagtagtagttactggttgaacattgtttgttggtgtatatattgtaattgaaattgctcgggggaataggttatgtgattaggagtagggttaggatgagttgggaaaaag

SEQ ID NO: 1056 - DNA, 521 bp, Homo sapiens
aaataaggcttggggtttttcccggtcttttggggaacttgaaactgaggtgggactttccagaaactgttgctagtttcgctttatctgagtaccatctgttcttggccctgagccggggcccaggtgctcgaccacagatatcctgtttggcccctgtcccagttttgttcagccttattctttaactaaacttccttgtgactcttgagaactcagctctggtactttttcatgccttgcaaaatggcgttactgcagctagcttgctaagccttatggtggggtctttcattcccccctctttctggaaactgaataaaatcttttattcacgcgattctacttcttctggatctattgatttgagttggtgatactgttgggtcagaaccagggcctgcaccaccgaaattctgtcttttacaaactggaccaagcggttgagaatgcagggtccgaggagtaggattaataaaagtactatcagagggcccataatggtggatatcagggtcgtg

SEQ ID NO: 1057 - DNA, 450 bp, Homo sapiens; identical to SEQ ID NO: 921

SEQ ID NO: 1058 - DNA, 496 bp, Homo sapiens
ctgaggacggaagggtttgtttcccgtttgaacctaaacgcaagtggaaaagaatactcagaatgtatttttctactttacatctgctggggaaggaaatgtgtcaggaagccgctgcatctggtcatttcatcgcatcagaatcacagcagacgtggaagattccatgtggtggggaataaagaaataactttatgctctcctgaaaaacagcgggagcctatgtgtgtgtgcgacactgtaatctcaaggagattcactcagagctgtctcagtccaactcctgcatgaccagatcttcccttagcatcttttctgtgatgaaatattatcttgtgttagagttaggaataggaactaacctgtaggagcatgtccccaaatggacatttgaatggactaacaaaaacaactggaaagactgaatttccgacacaaaggaatgatgggatcaaaaagaaagcagtgaggagttcttgagtcttgtagtacctat

SEQ ID NO: 1059 - DNA, 464 bp, Homo sapiens
aaatagccaatggctggttatgttttcagaaaacatgattagactaattcattaatggtggcttcaagcttttccttattggctccagaaaattcacccaccttttgtcccttcttaaaaaactggaatgttggcatgcatttgacttcacactctgaagcaacatcctgacagtcatccacatctacttcaaggaatatcacgttggaatacttttcagagagggaatgaaagaaaggcttgatcattttgcaaggcccacaccacgtggctgagaagtcaactactacaagtttatcacctgcagcgtccaaggcttcctgaaaagcagtcttgctctcgatctgcttcaccatcttggctgctggagtctgacgagcggctgtaaggaccgatggaaatggatccaaagcaccaaacagagcttcaagactcgctgcttgctctctccctttataaactgg

SEQ ID NO: 1060 - DNA, 471 bp, Homo sapiens
tggagtcagaggtacctcctaagcacaaagaaacccgctggaaatatcactttgaggtagtgagagacacattacacctaaccaacaagaagaaggatcctcccccttataatttaactatgtttacagggaatgcgtacattgtggcttcccgagatttcgtccaacatgttttgaagaaccctaaatcccaacaactgattgaatgggtaaaagacacttatagcccagatgaacacctctgggccacccttcagcatgcacggtggatgcctggctctgttcccaaccaccccaagtacgacatctcagacatgacttctattgccaggctggtcaagtggcagggtcatgagggagacatcgataagggtgctccttatgctccctgctctggaatccaccagcgggctatctgcgtttatggggctggggacttgaattggatgcttcaaaaccatcacctgttgg

SEQ ID NO: 1061 - DNA, 490 bp, Homo sapiens
  misc_feature 415, 472: n = A,T,C or G
cctacagacttatttcttcttggacacacccacggtgcggccacggcggccagtggtcttggtgtgctggcctcggacacgaaggccccagaagtgacgcagccctctatgggcccgaatcttcttcagtcgctccaggtcttcacggagcttgttgtccagaccattggctaggacctggctgtattttccatcctttacatccttctgtctgttcaagaaccagtctgggatcttgtactggcgtggattctgcataatggtgatcacacgttccacctcatcctcagtgagttctcccgccctcttggtgaggtcaatgtctgctttcctcaacaccacatgagcatatcttcggcccacacccttaatggcagtgatggcaaaggctattttccgccgcccatcgatgttngtgttgagtactcgcaaaatatgctggaacttttcagggatcactagagacgtggcngcagcacaagcggcggcg

SEQ ID NO: 1062 - DNA, 536 bp, Homo sapiens
aaaccaaccactgccaccaactgaataaggatttccctaaacagcctcaatttgagagactaaccagaggaccttctctatgcaaattacatgccaatacaccttaaaagaaaataagacaaaagtgaatgagttttttcattccatattgctttctttggttgcagagcaatccagtgccctttccagataataaaattgaaatgaagatttcaatttaatatttggcagacagcaacaatgcaggttattaaaaatattaaaggggcagaggcatgctttgaattactcagattttcagaaaacatttgacaaaaccctttctctataaaagttatggtctaaatttatgttgttttataaggcaactgtatatacatttcttcaaggtcaatgaagacacttgtgtgatatttcctcagaattaaatgagaaggcattcagatttaagaacagaatgtaacacaggattaggcacattttattccaaatcataaccataaagatttagaaaatcaaatacatcaaagaacttt

SEQ ID NO: 1063 - DNA, 570 bp, Homo sapiens
ctgacagaggtaatgttacatcacctaaaaaagaaagatacacggtcagttatcctaaaaataaattgtttggaaagtacaatgcaccacatttttgtagaagtctactatttgataaacagttgaaattcaagatgtgtttgacccttagtcatttttactctttggttctgagtatacctattttcttagcgtatctgccttgtttatctttttcttcaccttttaacaagtatgacataggaaagtcatttttttttagaattcatggatcagtctgatctactcttattcataatggaacatgtaaatatactgaaaactgtttttcaggagagaaatatgagttggagggaaggaaaagtggttctacttatgttccaaaatcctcatcagagaaggtatgatgttctcaggtgtggaaaatattttttagttgattgagaatgcaggtttaacagaagagataaggggcataatgactgctggttttccagactggattttcctaccgcaactattaatgttctcagagttgatgaggaccacctttgtgtatacacttgtagt

SEQ ID NO: 1064 - DNA, 567 bp, Homo sapiens
aaacctaacccatgttagctgcaactccactacagtcttgatcacttagctcaggaaacaaacgcccagcaacaaccctcgtatctcattaataccaatctgtggccctcactgactcagtggtacttttttataaaaatatctgaagaagtggcaaacggttacaacggatgtcaggtcgaagcaattccaaaagctgagaaaacgcttcatccgctgcttgtcttctccccctattgctacagttctgccaccaaagggggaaaattacgtgaatatgattgttgtgaccaagccttggcaaaagtcaataaataacagaacctgtcaagggcagagcaattttatgggcaacctcttctagttgcaaatgtgggggttgggaaaagtgggagagaggcatgtgtgcaagaaagagataagggtccttttgggaagggtttggtgacccagccccagctcaatgccagcagactaggacccgctaaaacccattattcagacggaaaggggagaagagaagacaccaaaaaatgtagtcagttttgcaatttgcacagacctgcc

SEQ ID NO: 1065 - DNA, 400 bp, Homo sapiens
aaaattaattgstcccttccctgaakagggtctggctcagaagaaacwggaactggtmsagcytgcaccctgtccacagtgatccactactaaaaatactcatacctaggaggacyttaaacttcwgaatgctggtwcagtaakgctccactgtaaaatcaaacatcttttgtggtattcatttttttattgcttgatgtctggaacagttaccgaaactagacctgtattgcgcatctmtactagtgcttgggcctsaaagcagtgctcgtcacctaactgcwcaaagaaatgctattaggtccaattgtgasataagctgaattataaatacrcaattttcasaacgacaggcacttaaagctcattaagtaaaatacawaaatagattatattaata

SEQ ID NO: 1066 - DNA, 560 bp, Homo sapiens
ctattgtttgggtgcatgctttcccagaactgtttttgtcttgcttaaatcatccggacaaaaaaattgttgcctactcttcaatgattttgtttacatcccttaatcatgaaagaatgaaagaactggaggagaacctcaatattgcaattgatgtcatagatgcttaccaaaaacatcctgaatcagaatggccgttcttgattattacagacctctttctgaaaagcccggaattggtacaagccatgtttcccaaactgaacaatcaagaaagagttacactgttagaccttatgatagccaagataacgagtgatgagccactcaccaaggatgacatccctgtgtttttgcggcatgctgagttgattgcaagcacctttgtggatcagtgcaagactgtgctcaagctggcctctgaggagcctcctgatgatgaggaggcactggctacaattaggcttctcgacgtcctgtgcgaaatgactgtgaatactgagctgctcggctatctgcaggttttccctggcttgctggaaagagtgattgatcttttg

SEQ ID NO: 1067 - DNA, 459 bp, Homo sapiens
aaaagacaaaaacaaaacaaaaataccacagctcaagataaagagtcctatacagaaatcacaaaaaggacagaccatctaaggaaaaattaaaaagacgacacaaggacaggctgggcagcctgggtcagggctcctggctggtgacctgctttgagtaggtttcttgcaggtacttcttaaaagctgtggggtttttccagagctcggcagcatgtgtgttcaagggactatcaatgttgggttctcctagaaggctctggatggagagcagaatggtcctgacatcatacagggcagaccacttttccttcaggatgtccaggcatatgttaccctgggtgtccacgttggggtgatagcagggcgtgaggaacttcactgtgggcgcattgtaagggtagccactggggaactctagcgagagcttatacctcaggtcttcatatactgttccag

SEQ ID NO: 1068 - DNA, 461 bp, Homo sapiens
cctactctgcacttaaaaatatcttcaaaaaagttgctggtcaaggagtatgcagcaatggtccttcctgttgtgaacattgagtcctagtgggtgaggtgtgggttgttactattaaaaatccttgttgtattgggcacaagatagactgaaattgactgtagtcctcacggtgagtctaattgcagcaacatgtgaaaaaggcaggcaagagctgagtcaggaaaatagacaagcagggtaccttcagaaaggccagccataccaatagccagaatatgatctggaagaaccagcagatcaataaggaagttctgtaaattagtttttactctgggtactcaggggttaatccatagggcttattctggatacagttttctgatcttacagagccagtcaggtacatcagctttcagtttcttgctcatctgccaaagaactttcagctcaggagaagg

SEQ ID NO: 1069 - DNA, 429 bp, Homo sapiens
ccaggtggctcatgcagtcaccggagctttgcttcaggacatgtgtgctacaagtccaggctggacaaccccaagaactgtgggggttcagcaagcggggtgggtccactgagctctcaacacaagcttccgggacccagaccctcatctggaaaccacacaggccagccctgcgatgctctgtgtagcagggagcaagggtcacaccacagccacatctgcttcattcgggggatccaacttggcatgtcttggtaaaggcattcatggtgctgcccaggacaccagcaagcactgaagtcctcacaagttacttcaggagtttaaccctgcacacgcccaacagaagggttttcaccagctctgagcctggacacttacaggcacactgtatgttcaagtcagttattctgtctccatctagaaagg

SEQ ID NO: 1070 - DNA, 644 bp, Homo sapiens
  misc_feature 543: n = A,T,C or G
gtgataccaacatggtagactttgctatggatgtatacaaaaacctttattctgatgatattcctcatgctttgagagagaaaagaaccacagtggttgcacaactgaaacagcttcaggcagaaacagaaccaattgtgaagatgtttgaagatccagaaactacaaggcaaatgcagtcaaccagggatggtaggatgctctttgactacctggcggacaagcatggttttaggcaggaatatttagatacactctacagatatgcaaaattccagtacgaatgtgggaattactcaggagcagcagaatatctttatttttttagagtgctggttccagcaacagatagaaatgctttaagttcactctggggaaagctggcctctgaaatcttaatgcagaattgggatgcagccatggaagaccttacacggttaaaagagaccatagataataattctgtgagttctccactttagtctcttcagcagagaacatggctcattcactggtctctgtttgttttcttcaatcaccccnaaggtcgcgataatattattgacctcttcctttatcagccacaatatcttaatgcaattcagacaatgtgtccacacattcttcgctwtttgactacagca

SEQ ID NO: 1071 - DNA, 514 bp, Homo sapiens
aaatatcacaagtaggtcttaagtgtcatctggcatcttctttctgtagccaggtaactcttagatcttattcatcagcctgctgaacagttcctttttcagagacatagataccatccaaaaatttcctgatatccttgtttttaactgttgtggcttgctgaatcaaagccgctgaatttgaaacaagctcaatgtcatttccttcaaggattaattcatctttctgggcttgagatactgaacaagcaacacctggtctcatccgaaccctgcggatgtatttttcacccaagaaatttcggatttcaacaagagacccattctcctggataacaacgttgatggggaagtgagcatacacagacctcatcttgtaacggaagcccagtgtaacacccttgatcatgttctgtacatgactacaaatagtccgaacggtagccagttcctttctgttaccccaccatttgtcaacccggagcctcttttttttctttccaagaaggctgag

SEQ ID NO: 1072 - DNA, 477 bp, Homo sapiens
  misc_feature 467: n = A,T,C or G
ctggagctgacttttttggattttctcatccagccatccacaacctgatccagagctgtccaggagctcgaaaatgcatcaattaccagtgggtgaaatttgatgtgtgcaaacctggagatgggcagctacctgaggggctgccggagaatgatgcagctatgagctttgaagcctttcagagacagatctttgatgaagatcagaatgatccccttctgccaggatccttggacctcccagagcttcagcctgcagcctttgtgtcttcttaccagcccatgtacctgacacatgaacccttggtagatactcacctgcagcacttgaagtctccatcacagggtagcccaattcagtcttcagattgaacaagaagggatcagatgccacatcgtttttgtcgtgattaatttaacttaaactaaaattttgggtatatgaaagaaggcagcaattcagaagtnaagaagatac

SEQ ID NO: 1073 - DNA, 501 bp, Homo sapiens
  misc_feature 465: n = A,T,C or G
gccagtcaatcccaaccactatgctctccagtgtacccatgatggaagtatcttgatagtacccaaagaactggtggcctcaggccacaaaaaggaaacccaaaagggaaagagaaagtgagaagaaactgaagatggactctattatgtgaagtagtaatgttcagaaactgattatttggatcagaaaccattgaaactgcttcaagaattgtatctttaagtactgctacttgaataactcagttaacgctgttttgaagcttacatggacaaatgtttaggacttcaagatcacacttgtgggcaatctgggggagccacaacttttcatgaagtgcattgtatacaaaattcatagttatgtccaaagaataggttaacatgaaaacccagtaagactttccatcttggcagccatcctttttaagagtaagttggttacttcaaaaagagcaaacactnggggatcaaattattttaagagkdattttcagtttt

SEQ ID NO: 1074 - DNA, 451 bp, Homo sapiens
ctggtatctatgaggccctagagctccgggacaatgataagactcgctatatggggaagggtgtctcaaaggctgttgagcacatcaataaaactattgcgcctgccctggttagcaagaaactgaacgtcacagaacaagagaagattgacaaactgatgatcgagatggatggaacagaaaataaatctaagtttggtgcgaacgccattctgggggtgtcccttgccgtctgcaaagctggtgccgttgagaagggggtccccctgtaccgccacatcgctgacttggctggcaactctgaagtcatcttgccagtcccggcgttcaatgtcatcaatggcggttctcatgctggcaacaagctggaaaccctgttcttgggtgggtgtgggtataatactaagttgagatgatatcatttacgggggaaggcgctttgtgaagtagg

SEQ ID NO: 1075 - DNA, 472 bp, Homo sapiens
aaaatcaaagtgcagattgcttgtatgtaaaacccaaataaaggtagagtaagtgtgatatatgggagtattaaaatagcttaaaatttctcgtgaaggacatgtggctaaagggtcaaaaaggatgtaagacttggagccagagcatagtatttcctgaaataacaagtttagtgctttaactatggctacatgtgcttaaggaattttgagccacttatttttgaagatgctgaggacatgtagagtgctttttgtagtgagctaaccttgatctctaaggactaactacccaggtccaggtcttcactaggggtactgacagtgtttaagctttactccacctccttacttagaaatcactttacgatttatttccattttccacttttatagaccatccttttgcttatatgctagatttttctggtgagggaagggttgtgttcttcaggggtcttttgttttgaaa

SEQ ID NO: 1076 - DNA, 516 bp, Homo sapiens
  misc_feature 487: n = A,T,C or G
ctggcagcaatgggtaacacacagaggaaagaggcagcagatcccctagcatctaaacttaacaaggtcacccaattgacaggtttctcagatcctgtatatgcagaagcttacgttcatgtcaaccaatatgatattgtcctggatgtacttgttgtgaaccaaaccagtgatactttgcagaattgcacattagaactagctacactaggggatctgaaacttgtggaaaagccgtctcctttgactcttgctcctcatgacttcgcaaatattaaagctaacgtcaaagtagcatcaacagaaaatggaataatttttggtaatatagtttatgatgtctctggagcagcaagtgacagaaattgtgtggttctcagtgatattcacatcgacatcatggactatatccagcctgcaacttgcactgatgcagaattccgtcagatgtgggccgaatttgaatgggaaaacaaagtgacagttnacaccaacatggttgatttacctcggccg

SEQ ID NO: 1077 - DNA, 454 bp, Homo sapiens; identical to SEQ ID NO: 926

SEQ ID NO: 1078 - DNA, 553 bp, Homo sapiens
  misc_feature 544: n = A,T,C or G
ctgcttccattggtgggtcatttttgctgtcaccagcaacgttgccacgacgaacatccttgacaggcacattcttgacattgaagcccacattgtccccaggaagagcttcactcaaagcttcatggtgcatttcgacagattttacttccgttgtaacgttgactggagcaaaggtgaccaccataccgggtttgagaacaccagtctccactcggccaacaggaacagtaccaataccaccaattttgtagacatcctggagaggcaggcgcaagggcttgtcagttggacgagttggtggtaggatgcagtccagagcctcaagcagcgtggttccactggcattgccatccttacgggtgactttccatcccttgaaccaaggcatgttagcacttggctccagcatgttgtcaccattccaaccagaaattggcacaaatgctactgtgtcggggttgtagccaattttcttaatgtaagtgctgacttccttaacaatttcctcatatctcttctggctgtagggtggctcagtggnatccatttt

SEQ ID NO: 1079 - DNA, 578 bp, Homo sapiens; identical to SEQ ID NO: 971

SEQ ID NO: 1080 - DNA, 417 bp, Homo sapiens
ctgtcttcacaaaggatttggacaaggccaattacctgtcccaggccctccaggcgggcactgtgtgggtcaactgctatgatgtgtttggagcccagtcaccctttggtggctacaagatgtcggggagtggccgggagttgggcgagtacgggctgcaggcatacactgaagtgaaaactgtcacagtcaaagtgcctcagaagaactcataagaatcatgcaagcttcctccctcagccattgatggaaagttcagcaagatcagcaacaaaaccaagaaaaatgatccttgcgtgctgaatatctgaaaagagaaatttttcctacaaaatctcttgggtcaagaaagttctagaatttgaattgataaacatggtgggttggctgagggtaagagtatatgaggaacctttt

SEQ ID NO: 1081 - DNA, 506 bp, Homo sapiens
  misc_feature 436, 504: n = A,T,C or G
gccgcggtgggagaggaacgcgcagccagccttgggaagcccaggcccggcagccatggcggtggaaggaggaatgaaatgtgtgaagttcttgctctacgtcctcctgctggccttttgcgcctgtgcagtgggactgattgccgtgggtgtcggggcacagcttgtcctgagtcagaccataatccagggggctacccctggctctctgttgccagtggtcatcatcgcagtgggtgtcttcctcttcctggtggcttttgtgggctgctgcggggcctgcaaggagaactattgtcttatgatcacgtttgccatctttctgtctcttatcatgttggtggaggtggccgcagccattgctggctatgtgtttagagataaggtgatgtcagagtttaataacaacttccggcagcagatggagaattacccngaaaaacaaccacactgcttcgatcctggacaggatgcaggcagattttaagtgctgtggggctgctnac

SEQ ID NO: 1082 - DNA, 520 bp, Homo sapiens
aaatacaccgacagtaaatggttcacggccgacatcatgtccataggggtgaattgtacacagatcacagcaacagagtgtgacttcactgccgccagtccctcagcaggcttcccaatggatttcaatgtcactctacgccttcgagctgagctgggagcactccattctgcctgggtgacaatgccttggtttcaacactatcggaatgtgactgtcgggcctccagaaaacattgaggtgaccccaggagaaggctccctcatcatcaggttctcctctccctttgacatcgctgatacctccacggcctttttttgttattatgtccattactgggaaaaaggaggaatccaacaggtcaaaggccctttcagaagcaactccatttcattggataacttaaaaccctccagagtgtactgtttacaagtccaggcacaactgctttggaacaaaagtaacatctttagagtcgggcatttaagcaacatatcttgctacgaaacaatggcagatg

SEQ ID NO: 1083 - DNA, 440 bp, Homo sapiens
aaatgagaatacgagaatacccagaattttattcccagcctttgtgtggaaaaggcagtttgcattcttaggaaacatctaactgttacctaaaccataaatatttctatctactccattcaacccaattaaagaaaacaaaatgatgagaaaaataggagccgaacagaaagaaaattcacatcattttctactattacgaacattcaaatggtgcttcaaattaaatacttttaattatcattctagccaggatcatactaagtaggatctcatgacagtcacatatgcagcgacttcacctaaaccgtggcactgaatgctctgccatgagccgcaagcagcacagtgatcatcacccacaaggacaggttgctgggatgaggcaccctttcctttcatgtttaggttcttctcacctgcatttcactttcctaaag

SEQ ID NO: 1084 - DNA, 495 bp, Homo sapiens
aaaaggaaaagataccaaatgcctgctgctaccacccttttcaattgctatcttttgaaaggcaccagtatgtgttttagattgatttccctgtttcagggaaatcacggacagtagtttcagttctgatggtataagcaaaacaaataaaacgtttataaaagttgtatcttgaaacactggtgttcaacagctagcagcttatgtgattcaccccatgccacgttagtgtcacaaattttatggtttatctccagcaacatttctctagtacttgcacttattatcttttgtctaatttaaccttaactgaattctccgtttctcctggaggcatttatattcagtgataattccttcccttagatgcatagggagagtctctaaatttgatggaaatggacacttgagtagtgacttagccttatgtactctgttggaatttgtgctagcagtttgagcactagttctgtgtgcctatgaagttaatgctgc

SEQ ID NO: 1085 - DNA, 430 bp, Homo sapiens
cctatattcagccacagcctctgggagtggtgctgataatcggagcttggaattaccccttcgttctcaccattcagccactgataggagccatcgctgcaggaaatgctgtgattataaagccttctgaactgagtgaaaatacagccaagatcttggcaaagcttctccctcagtatttagaccaggatctctatattgttattaatggtggtgttgaggaaaccacggagctcctgaagcagcgatttgaccacattttctatacgggaaacactgcggttggcaaaattgtcatggaagctgctgccaagcatctgacccctgtgactcttgaactgggagggaaaagtccatgttatattgataaagattgtgacctggacattgtttgcagatgcataacctggggaaaatacatgaattgtgg

SEQ ID NO: 1086 - DNA, 356 bp, Homo sapiens
caggtgtcatagcttggctttccaatggctctccccgtggggaaagaatacacaggctgtgttgatggtattctagtcctgacgagagctgcgtttctcatggtcagcaaatgaattggcatccgatatataagcaaatcttgtgactgtaaagtcatatactttcttgttagttgagggaatcagatttctgagggtaagaggtgaagccaagaacatggcaaattcattatcttgataaaaactacccggtaaggctgcccattttctttcaaactgcaacaccatatgtccagcgaggttcctcttacgagacatcaggggtatcaggagtgggtgccaagctatgacacctg

SEQ ID NO: 1087 - DNA, 522 bp, Homo sapiens
cctatgcatagttaataaggttataatctactcaacatggaaaatggagcctatttgcaaacacacaagtaattaaagtaccaattctctcttagtttctttttttatagttggtttattttgcaattataaatgttaaacatccctagagatgaaagttaaaatggttgatcacagatcagtagcaaaatacaaattgacaattcaaaattataaataaaactctgttgaggatgtttaactttgagtctccaaatttaagagctaagcttggaagaaacaaatttataggttatatttccctcttaaattaaaaaacaaacttcctctggcagtagtttgtgaattcctttcattgtaatgataccatgattacaggatcaaaaatgcttaacttacttgccattctgctcacatcatcacagttgtttttttttttaagcactcaatgtaggcattttaatcttctggataacagagtatcttttgagaaattaaaatcgaattgaccatttgcaatat

SEQ ID NO: 1088 - DNA, 471 bp, Homo sapiens
aaacatccaattaagaataaatctgagccaacaccttgatgatgacaagggaatgtgctgatatcgtgttaaactgatgtggcagtaaaccaagggactaagcacatgattattcaaattaaaacataaaaaggacaaaaggtgtggattttctgggctacatcacataatatttgtctggcgaaaccataatacagatttgggtaaaggagatttttaatagataacaagtaattctttatagggatttgagaaagtacgagaacatatgggaaaagcttagtaatttaagatttacttttgtaaaaccatgtggacaaatattaaatgttatgcttgcattttgaacattataaatataaaacataaaacatccaatgttaaatactgatatcccatgcctgacctggatttagatattgagtatttcccagtttaagtattgacaaaactttgaaagtttctttcttt

SEQ ID NO: 1089 - DNA, 495 bp, Homo sapiens
ctacacgccgccgcttgtgctgcagccatgtctctagtgatccctgaaaagttccagcatattttgcgagtactcaacaccaacatcgatgggcggcggaaaatagcctttgccatcactgccattaagggtgtgggccgaagatatgctcatgtggtgttgaggaaagcagacattgacctcaccaagagggcgggagaactcactgaggatgaggtggaacgtgtgatcaccattatgcagaatccacgccagtacaagatcccagactggttcttgaacagacagaaggatgtaaaggatggaaaatacagccaggtcctagccaatggtctggacaacaagctccgtgaagacctggagcgactgaagaagattcgggcccatagagggctgcgtcacttctggggccttcgtgtccgaggccagcacaccaagaccactggccgccgtggccgcaccgtgggtgtgtccaagaagaaataagtctgtagg

SEQ ID NO: 1090 - DNA, 542 bp, Homo sapiens; identical to SEQ ID NO: 400

SEQ ID NO: 1091 - DNA, 549 bp, Homo sapiens
aaataccataacctgtccctcccaccccccaactacattcgaaaaagtaagaacagcagaaagatcacgaaggccatgtaaaattaattcagatttaattttcttcagggctgtaatcactagggatcaaaactccttagtctggttgattgctgaatgggagaggagtaagtgagaaagatcatggcaggctggccctgcaattattcaaacccaggcccctggctgcctgggaacgggacttgggtgagatgaagtagtaaagacagcagttctgcccatggtgtggagactaaaaagcaaagcaggccaaacttagcttccatggttacatttggaagtttctattcatgacaccaaataaaagtggggaagaaggaagcatggcttactgaagtagtctcaggaagacagggcaagtgtgcaaaaagccacactgccaaagcaggctactagtgaggatcatcctgggtgacttcgaatgcacttgaggggaaaggctcaagtaccctgtagttgtagcaggaaaaagacataaccatgtgttgt

SEQ ID NO: 1092 - DNA, 505 bp, Homo sapiens
ccaaagcaaggaagtgtcatggaaggtgttgggtggtgacggtgcaaaaaggaacttgaggaggagggagaaaaagcagcacccctcgataaaggtgggggagagaagatatggggaaagccctgaattcctcaccgaaggccaatctcagaggggagtggaggggttacaatctatgcttcggccaagggcgggagtggaggagcgtggggacaggatgatggtttggaaggggcatcacttaagacttaaagaaaccaggggtgcaggcgaaacaccccacacacctagcagtagtcccacaggctgcgacctgaaaccttcacatctactctaacaagccccccaggctagagggctgttgttgcagggagggtgggaggcgggagggtaaagggagaaggcagagaccccaggccgtgtaatcagcagcaaggtgattgtgtgatgtgtcttttcacagttgagttagatgtgccccaccagttatgatgggaatcaattt

SEQ ID NO: 1093 - DNA, 500 bp, Homo sapiens
cctgggcttgaaatttgctgagctggtgtataccggtttctggcacagccctgggtgtgaatttgtccgccactgcatcgccaagtcccaggagcgagtggaagggaaagtgcaggtgtccgtcctcaagggccaggtgtacatcctcggccgggagtccccactgtctctctacaatgaggagctggtgagcatgaacgtgcagggtgattatgagccaactgatgccaccgggttcatcaacatcaattccctcaggctgaaggaatatcatcgtctccagagcaaggtcactgccaaatagacccgtgtacaatgaggagctggggcctcctcaatttgcagatcccccaagtacaggcgctaattgttgtgataatttgtaattgtgacttgttctccccggctggcagcgtagtggggctgccaggccccagctttgttccctggtccccctgaagcctgcaaacgttgtcatcgaagggaagggtggggggcag

SEQ ID NO: 1094 - DNA, 534 bp, Homo sapiens
ctacagcctgggactgaccggggggctctgattatttacccaccacaggtaggttgtgttctgaatctcaggttcacaggttaaggctacagcatcctcatcctccacggggttggagttgttgctggtgatgaagggtttgggtggctctgcatagactgtgatcgtcgtgactgtggtcctattgaggccagtgtctgagttatgggcttggcacgtataggatccactattattcacagtgatgttggggataaagagctcttgggtggattgctggaaagtcccattgacaaaccaagagtactgtgcaggtgggttagaggctgcgtggcaggagaggttcagattttcccctgatctgtaagatgtgtttagaggggaaatggtgggggcatccgggccatagaggacattcaggatgactgaatcactgcgcctggcactcactgggttctgggtttcacatttgtagcttgctgtgtcatttcttgtgacattgaatagagtgagggtcctgttgccattggacag

SEQ ID NO: 1095 - DNA, 495 bp, Homo sapiens
  misc_feature 484: n = A,T,C or G
cctcatggggctgaagaacctggaggagtgtgccagggccatttgtcctccagtttacttgatgccaaatttctcctgtgagcaggttgtactcgtaaaacaaggatcatcgatgttgtctacaatgcatctaataacgagctggttcgtaccaagaccctggtgaagaattgcatcgtgctcatcgacagcacaccgtaccgacagtggtacgagtcccactatgcgctgcccctgggccgcaagaagggagccaagctggtgcgtgttacttccctgtaggggttgtggggagggcagcctgactccagccttctcgtgatgaaaactctgtccagttctgctactgaagggagagagatgagagccttttaggctgaggaaggccagcactggggtgtgcagggttcgagaaagctcccagggcctgccttccttccctgagctcatatatttgtatccccttttcagactcctgaggaangaagagatttt

SEQ ID NO: 1096 - DNA, 510 bp, Homo sapiens
cctacctcaaacccgtggtggatgactcgaagggatcctttctgtgggggaaacctgatctcgacaaaattagagaattttgtcagcggtatttcggctggaacagaacgaagacagatgaatctctgtttcctgtattaaagcaactcgatgcccagcagacacagctccgaattgattccttctttagattagcacaacaggagaaagaagatgctaaacgtattaagagccagagactaaacagagctgtgacatgtatgctaaggaaagagaaagaagcagcagccagcgaaatagaagcagtttctgttgccatggagaaagaatttgagctacttgataaggcaaaacgaaaaacccagaagagaggcataacaaataccttagaagagtcatcaagcctgaaaagaaagaggctttcagattctaaacgaaagaatacatgcggtggatttttgggggagacctgcctctcagaatcatctgatggatcttcaagtgaagatg

SEQ ID NO: 1097 - DNA, 500 bp, Homo sapiens
cctcacccggcccggacacggacaggattgacagattgatagctctttctcgattccgtgggtggtggtgcatggccgttcttagttggtggagcgatttgtctggttaattccgataacgaacgagactctggcatgctaactagttacgcgacccccgagcttccagtacacagacgagcatggggaagtttgtcccgctggctggaagcctggcagtgacacgattaagcccaacgtggatgacagcaaggaatatttctccaaacacaattaggctggctaacggatagtgagcttgtgcccctgcctaggtgcctgtgctgggtgtccacctgtgcccccacctgggtgccctatgctgacccaggaaaggccagacctgcccctccaaactccacagtatgggaccctggagggctaggccaaggccttctcatgcctccacctagaagctgaatagtgacgccctcccccaagcccacccagccgcacacagg

SEQ ID NO: 1098 - DNA, 508 bp, Homo sapiens
caaaactacttacctggaagaccttccaccaccccctgagtatgaattggccccgtccaagttagaagaggaagtggatgatgtctttctcattcgagctcaaggactgccctggtcatgcactatggaagatgtgcttaactttttttcagactgcagaatccgcaacggtgagaatggaatacattttctcctaaacagagatgggaaacgaaggggtgatgccttaattgaaatggagtcagagcaggatgtgcagaaagccttagagaagcaccgcatgtacatgggccagcggtatgtggaagtatatgagataaacaatgaagatgtggatgccttaatgaagagcttgcaggtcaaatcttcgcctgtggtaaatgatggtgtggttcgtttgagaggacttccttatagttgcaatgagaaagacattgtagacttctttgcaggactgaatatagttgacattacttttgtgatggactatagagggaggcgaaaacag

SEQ ID NO: 1099 - DNA, 450 bp, Homo sapiens
aaaattaattggtcccttccctgaagagggtctggctcakaagaaacaggaactggtagagctgcaccctgtccacagtgatccactactaaaaatactcatacctaggaggaccttaaacttctgaatgctggttcagtaaggctccactgtaaaatcaaacatcttttgtggtattcatttttttattgcttgatgtctggaacagttaccgaaactagacctgtatcgcgcatctctactagtgcttgggcctcaaagcagtgctcatcacctaactgcacaaagaaatgctattaggtccaattatgagataagctgaattataaatacacaattttcagaacgacaggcacttaaagctcattaagtaaaatacaaaaatagattatattaataagaaatatttagtgttcatcaaattgtaaatctaggcttttgccatttttt

SEQ ID NO: 1100 - DNA, 266 bp, Homo sapiens
aaactaaaaataaccacatstcacctgcaacattcaataatakcaatmacttgatgtataaaatwttaactatgcccccarttattttaakacacaaaaaaatggctgcctaccaatctgtyttcacaagtkrsaaatactacatttaatgatttaacatgagggtttcaagtttcctccagtttaggcatttataccttwgtgcttgwtttgttkcaggatgttgctatagcattgatattggataacccatatytatatacttt

SEQ ID NO: 1101 - DNA, 505 bp, Homo sapiens
cctagccttactcttactggctgtaatttcagtgttgaagtaaaaacaacgaagttttgactgatattttgagaagttttcattgcattgggtcagaagatagaatggaagaaaaggaaaactgctaaggaaataaatacagtattaaaggatggaaatgtttatactgagacgttgtcactggcactaaagaaaataggattagagagcaatgaataaaaaatatttattaagcacctactgtgggtaagacactgtgttaatcacagagataaatctacctatagtccttgtttctggaggttgttgccatggtgagatttgatttcatgtatgttcttttgtgatctattaacctagccatcatcattgattttattatttttgagtcagagtcgcactctgttgctcaggctggagtgcagtggtgtaatcttggctcgttggaacctccgcctcccaggttcaggtgattcttgtgccttagcctctggagtagctggga

SEQ ID NO: 1102 - DNA, 501 bp, Homo sapiens
ctgcttcaggatgggtatcacctggatgagattccagatgacgaggacttggacctcatcccccctaagcccatggcctcttcaacatgctcctgctgctggtgctgtcttggggactcttcttcctgtaccctccagtagacattaccctccaaggttgcacctgtctaactatgacagggatcatagcaggttgcttaatgatacagcaggatcctggcttccagaatccctggacctggggcatccccaactggtccaaccgtccgggtgagtttagtgattctggtttgcccttccctagttagagaaaaactgctctgacatgttcatatttatttatttgtatttccttggtctgggtgagtttcttcacccagtctttgagctaaagattaggtcgaaggtactggggctggccccagaagcctgcagtttttattattaccagcagagggagctacagggagcagtccggtgccttcctattgtttacttttt

SEQ ID NO: 1103 - DNA, 580 bp, Homo sapiens
aaagatctaattggcttttattagcgattcatgaactgggtagcatccagcctacaaaataaaacagaagccccgccaggtatgatagaatggtctgcatttgtaaagcagcactagcaggaacaaggaaacagcatagtagacacagcagattggttaacatcaggttacttcaggttacgttccttgtgtggattaaagcagagggggcttcctcatcataatcacgcttgctcacgttgactggactccctttgatcagttgctgtgaatctcctgacttgttgaaactgtcctatttttaagttcactttgattacatggactccattcctggatggagaggtgagatcttggagttccattcaacataaatgtattgtaaagtttttgttagagggcttgttaatgttggccttgggctagtcctttcccatctctgatcctctgcttcctaacttgtaaaatacagattaaatgctcctaacattatgaatctaagaaatgtcaggattagctaaattgcttaatggcacaacaatattagagtggaagctgagaagcaaaattgttacactga

SEQ ID NO: 1104 - DNA, 507 bp, Homo sapiens
  misc_feature 458, 497: n = A,T,C or G
ctgggcttggcctggagaggacggccctgcctgcctcttggcctcacgggaccgtcagcatgggctttgtcttggactctagtccttggctggactgtagaaggtgagaggcgagtcaccctcctcacagacctctgcttggagtatttaggatgactgctgtgaaatggagaacagtttcatcaggaccaaaaaacctcactgggcctttccagagaactgcagacctcactgtcagggtctttctgatgacgcctgtctgtgtgcatcatgtttctgagaccacagtttacctcaggtgtgcctgttgctttcttcctgcatagtctgttcctttcttcgtacatagtctgttccttttctctcctgtgtgcttgtcagtggggacccctcgcaaccctgcctgtcacctgggagggtgggaccaatgtccttktggtctttgctgctgctctcangcgcttctccaatgctctggagtgtgcatttcagcttgnacctgcttcc

SEQ ID NO: 1105 - DNA, 535 bp, Homo sapiens
cctactctgcacttaaaaatatcttcaaaaaagttgctggtcaaggagtatgcagcaatggtccttcctgttgtgaacattgagtcctagtgggtgaggtgtgggttgttactattaaaaatccttgttgtattgggcacaagatagactgaaattgactgtagtcctcacggtgagtctaattgcagcaacatgtgaaaaaggcaggcaagagctgagtcaggaaaatagacaagcagggtaccttcagaaaggccagccataccaatagccagaatatgatctggaagaaccagcagatcaataaggaagttctgtaaattagtttttactctgggtactcaggggttaatccatagggcttattctggatacagttttctgatcttacagagccagtcaggtacatcagctttcagtttcttgctcatctgccaaagaactttcagctcaggagaaggcctgggtttgtacttccacctccaccacatctgccagaccttaataaaggcccccacttctcccaaaaaaaaaa

SEQ ID NO: 1106 - DNA, 538 bp, Homo sapiens
aaataataagaagaccatcgcagagggaaggcgaatccccataagtaaggctgttgaaaatcctacagctacagagattcaagatgtatgttcagcagttggacttaacgtatttcttgagaaaaataaaatgtactctagagaatggaatcgtgatgtccaatacagaggcagagtccgggtccagctcaaacaggaagatgggagcctctgccttgtatagttcccatcacgtaagtcagtaatgttgtatgcagcagaaatgatacctaaactaaaaacaaggacacaaaaaacaggaggtgctgaccaaagtcttcaacaaggagagggaagtaaaaaagggaaaggaaagaaaaagaagtaacctagtatcagcatcaagtatgtggtactactgtaagagacatgaatggagacttctaacttgtatcggagggaaacagaagctttttgtttgcatcatttaactgaactgtgaacccttgtgcctctcatctttatcatcggagttgacagtgaaacaaatttacatcag

SEQ ID NO: 1107 - DNA, 497 bp, Homo sapiens
ggaaggtcttgaagcccattcaactcacagatccaggaaaaatcaaacgtattagaggaatggcgtactctgtacgtgtgtcacctcagatggcgaaccggattgtggattctgcaaggagcatcctcaacaagttcatacctgatatctatatttacacagatcacatgaaaggagtcaactctgggaagtctccgggctttgggttgtcactggttgctgagaccaccagtggcaccttcctcagtgctgaactggcctccaacccccagggccagggagcagcagtacttccagaggaccttggcaggaactgtgcccggctgctgctggaggaaatctacaggggtggatgcgtagactcgaccaaccaaagcctggcgctactactcatgacccttggacagcaggatgtttccaaagtcctgctaggccctctctctccctacacgatagaatttttgcggcatttgaagagctttttccagattatgttt

SEQ ID NO: 1108 - DNA, 474 bp, Homo sapiens
  misc_feature 432: n = A,T,C or G
ccttatttctcttgtcccttcgtacagggaggaatttgaagtagatagaaaccgacctggattactccggtctgaactcagatcacgtaggactttaatcgttgaacaaacgaacctttaatagcggctgcaccatcgggatgtcctgatccaacatcgaggtcgtaaaccctattgttgatatggactctagaataggattgcgctgttatccctagggtaacttgttccgttggtcaagttattggatcaattgagtgtagtagttcgctttgactggtgaagtcttagcatgtactsttcggaggttgggttctgctccaaggtcgccccaaccgaaatttttaatgcaggtttggtagtttaggacctgtgggtttgttaggtactgtttgcattaataaattaaagctccatagggtcttctcgtcntgctgtgtcatgcccgcctcttcacgggcaggtcaatttcac

SEQ ID NO: 1109 - DNA, 533 bp, Homo sapiens
aaaactttctctacttatttagttttctcctctgagttcaaccgctgctggattcgtttggcataactttgtgccatggagttaatgatagataggatgaagtaacacaccatgacaacgaccaacttttcaaacatccaggacaaccagttttctccctgtagaaataaatgcagaacaatgcaatgaaaaaggcttcattagttcagtagtaaaaagaggatcatctataatgcttgaagtgtgtaacttacaaaacctaaagaattaaaaatgaaaagtaagcaaccccaactactctgaaatctccattactctcctttttacacccaactatcaagatttcactttgttggatgtaaaatcagtgttgaatcacatagtttagaatgggatgagtgtgaggttagctcttctactaggacctaagaataaactctttgattaaactcaactctgaagtcgccatgcagatactcatgagtattgtcaagacagttaaatatttttgttccagtattaggagctgtttt

SEQ ID NO: 1110 - DNA, 546 bp, Homo sapiens
tccgatcccacttccagcacgttttcgtcatcgtcagggtgcacaatccgtgctctgacagtgtctgttatagtgtggctgttaccaggtccagagatgtgccttcctttgggcctcccattcctaaaggggtcactttccctaagtcaaatgtgttcagggacttccttttggcgaaagtgattaatgcagaaaatgctgctcataaatcggagaagtttcgggccatggcaactcggacccgccaggaatacctgaaagatctggcagaaaagaatgtcaccaacacccctatcgacccttctggcaagtttccgttcatctctctggcttccaagaagaaggaaaagtctaagccatatccaggagccgagctcagcagcatgggggccattgtatgggcagtccgggctgaagactacaacaaggccatggaactagactgccttttagggatctccaatgagtccattgtgctcattgaacaggaaacaaagagcgtggtcttcaattgttcctgtagagatgtgatagggtggacttcaa

SEQ ID NO: 1111 - DNA, 614 bp, Homo sapiens
ggaagaagacgagtgtatgagaagcctcaagaggatttattatgagatttctgagtgccagtcccaagagacctgaactagagacagtggcaatctgatgatgaaatgattgggtaggttgagtcgtagctgtttctggggggctggaagacaaaggggaagataacctggggttggtgctcaggtgggcatctcttacagtgacaaggacgtgggaaggaatgtggcactcacaatggtgtcagaggtgagtacaatcatcatgcctgctctacgggaaggagctgacactctcagtgggaacaacgatcaatctcatttacagacaaagaacagagtgacctggctaacaaatggctgatgcaaggttgaatccgtctgacccgaagcctgtgacaaggcgccctaagacagaggttgacaaagttctttttttcttgtgatggagtctcactctgtcgtccaggctggagtgcagtggcatgatcttggctcattgcaacctccacctcctgggttcaagcgactatcctgcctcagcctcccgagtagctgggattacaggcacccgccatcatgcccagctaactgttttatttttgtagagatgggat

SEQ ID NO: 1112 - DNA, 603 bp, Homo sapiens
tttagtttagagctgggcagtgaagtggatatcactgaaggagataggaagccagactacactgcttacgttgccatgatccctcagtgcataaaggaggaagacaccccttcagataatgatagtggcatctgtatgagcccagagtcctatctggggtctcctcagcacagcccctctaccaggggctctccaaataggagcctcccatctccaggtgttctctgtgggtctgcccgtcccaaaccttacgatcctcctggagagaagatggtagcagcaaaagtaaagggtgagaaactggataagaagctgaaaaaaatggagcaaaacaagacagcagccactaggtaccgccagaagaagagggcggagcaggaggctcttactggtgagtgcaaagagctggaaaagaagaacgaggctctaaaagagagggcggattccctggacctgcccgggcggccgcccgggcaggtttggacgagttggtggtaggatgcagtccagagcctcaagcagcgtggttccactggcattgccatccttacgggtgactttccatcccttgaaccaaggcatgttagcacttggctccagcat

SEQ ID NO: 1113 - DNA, 170 bp, Homo sapiens
ttttgaggtgttcctggtctttcactgacaattccaacattctttacttacagtggaccaatggataagtctatgcatctataataaactataaaaaatgggagtacccatggttaggatatagctatgcctttatggttaagattagaatatatgatccataaaaattt

SEQ ID NO: 1114 - DNA, 412 bp, Homo sapiens
ctgcagggccacattcccacactgcaaacccctccacccaccctcaactcacacacaccctggatcagcaggtctaggctgaaagagagaacagtgaggttcccagggtggcaggtgggtatgacaggcaccataccccaacctgctcaaaaccctaagttagcaaaggaagacagaagactggcttgcctgcccattcccctccccccacccccaacagcagcctcacatccctgatcagtaacactgtgattctgaggtgccaagaggaggggctttaccagcccctgggtgattactaccaaacggcccagaggccagagagagagggcaggaatttgccccactacctgctcagtattagccaagctgctgccttcagcttgtgcctgtgggtgcctccagcccctct

SEQ ID NO: 1115 - DNA, 416 bp, Homo sapiens
ctgatgcttttaagcagagcagcagacagcatatgcgatggtgacctagtggacagccagatccggagtaagcaaaactggagtcttctgcctgcgcaggccatttatgccagtgttcttcctggagagttgatgagggggtacatgacccagtttcccaccttcccaagctggttggggaagcactcgtctacaggcaaacatgatcgtattgttcaggacctggccttgcatatgagtctcagaacttactccagcaaaaggactgtaaacatggattatctgtcgcttctaagggatgcacttgtacagcccttgacctcacaaggagtagacggagtacaggatgttgttgcacttatggacacatattatttgatgaaagaagactttgagaatatcatggaaatcagcag

SEQ ID NO: 1116 - DNA, 497 bp, Homo sapiens
  misc_feature 350: n = A,T,C or G
cctagtatgaggagcgttatggagtggaagtgaaatcacatggctaggccggaggtcattaggagggctgagagggcccctgttaggggccatgggctgggttttactatatgataggcatgtgattggtgggtcattatgtgttgtcgtgcaggtagaggcttactagaagtgtgaaaacgtaggcttggattaaggcgacagcgatttctaggatagtcagtagaattagaattgtgaagatgataagtgtagagggaaggttaatggttgatattgctagggtggcgcttccaattaggtgcatgagtaggtggcctgcagtaatgttagcggttaggcaagctttntttttttttttttttttttttttggatgcaaacagcaaaaggctttattgggaacacgggtacccgggcgactcartctatcggatgactggcgcaccgagtgtggggtttttaccctttttatagggctggggagcaaaaagcgcg

SEQ ID NO: 1117 - DNA, 532 bp, Homo sapiens; identical to SEQ ID NO: 374

SEQ ID NO: 1118 - DNA, 443 bp, Homo sapiens
ctggcctggagcggtaccgagccatcacctcggcgtactatcgtggtgcagtgggggccctcctggtgtttgacctaaccaagcaccagacctatgctgtggtggagcgatggctgaaggagctctatgaccatgctgaagccacgatcgtcgtcatgctcgtgggtaacaaaagtgacctcagccaggcccgggaagtgcccactgaggaggcccgaatgttcgctgaaaacaatggactgctcttcctggagacctcagccctggactctaccaatgttgagctagcctttgagactgtcctgaaagaaatctttgcgaaggtgtccaagcagagacagaacagcatccggaccaatgccatcactctgggcagtgcccaggctggacaggagcctggccctggggagaagagggcctgttgcatcagcctctgaccttgg

SEQ ID NO: 1119 - DNA, 501 bp, Homo sapiens
ccttcctaagccctttgggttctattctgatgttttaggctagcaaccaactatgagagacacctcctggtgccatgtgcatttcagttaaagattcagagctggcagccgcttctgtcctggcccttttaaggtcagcctctattttatgtcctaatacattcttgcatcaaacttgcactggatgaagttgcaaagttcagacaatgcatcctcctttgcaaaattaagccttcagaatccccagggatgttttcaagctttctagttgagtaagatcaaaccaagttcacttcatgagttggtctttcctgattctctctctaataccatcccaatacacagatgagttcctcatgccctatttacaaggccgtctaaattccgtgcctttagctaccacatctaagagctgggaaagtggtacagaagcacaagaggaaggactcttcaaacaatctatgtaaaacagtagttttgagattctttttctattttttt

SEQ ID NO: 1120 - DNA, 491 bp, Homo sapiens
ttttttttttaagaggaaaacccggtaatgatgtcggggttgagggataggaggagaatgggggataggtgtatgaacatgagggtgttttctcgtgtgaatgagggttttatgttgttaatgtggtgggtgagtgagccccattgtgttgtggtaaatatgtagagggagtatagggctgtgactagtatgttgagtcctgtaagtaggagagtgatatttgatcaggagaacgtggttactagcacagagagttctcccagtaggttaatagtggggggtaaggcgaggttagcgaggcttgctagaagtcatcaaaaagctattagtgggagtagagtttgaagtccttgagagaggattatgatgcgactgtgagtgcgttcgtagtttgagtttgctaggcagaatagtaatgaggatgtaagtccgtgggcgattatgagaatgactgcgccggtgaagcttcagggggtttggatgaraatggc

SEQ ID NO: 1121 - DNA, 428 bp, Homo sapiens
cctacaaatcactctgtcctttacaaactccctcctcattctctgcatttgcctaggatattcactctatatggaatatctttttcctagctgattctacctgttcaaattttaccgactacctgaagccatttttgattactctgttatttgcctcatctaaactctcggatcatttattctatgatatgcagtttagcactttataacatgtggtagtcttatgccagtctaattattgtcaaagatgtcaatcctttgttctaactcacataggagactttttgttttttttgtttgtttgttttttttgttttgagagctggagtctcgctctgtcacccaggctggagtggtaaaaggctcagaaaaatcctgcgaagaaaaaaacttctgaggtaataaataggattatcccgtatcgaagg

SEQ ID NO: 1122 - DNA, 554 bp, Homo sapiens
ccaggaccacaaccccacgctgtagctggtagcgcagggcaatcagggctggggttcgcttgtgcttttttgccaaggcacaaaggactgggtcctccaagagcaccggggagttcgggtccacccatggttcttctcggtgggatcccagagcactataggcaaccagaacaatgtcttttgacttgcagaaatccagcagttttctctggttgaagtaaggatgacattccacctggttgcagacaggcttgtacttgagccctggcttgttgaggatcatctccagcagcctgtggttgaagttggacaccccgatggacttggccaatcctgcatctttacacttctccatggcctcccatgtggcacagagatccactgtgtcaaatagtatttttccattttcatcttttgggatcacttcctcacctggctttacagacactggaaaatgaataagatagaggtcaacatagtccaattgaagatttttcagtgacctttccaaggctggtcggaccaactctggtcgatgggaattgctccaaagc

SEQ ID NO: 1123 - DNA, 362 bp, Homo sapiens
gggcagacttagatgctgtccatagctttgaactcgctgagggcctgcaccgggttcacgtgcttcttctgagatgcccgtttaatcttggtctgtgtctcatcctgtttctctctcttcaccaatggctttttctctggtgccttcatcttccatgacacagcaggaaggttgagggaagccataccctgtgacttttggtatttggtagaggcgacgtaggatgccttcactgtctgcaccacagcattcatcaagttcttggctgcctggatcagggacatggcgctgtccaccccagagacaacaagctccccgccgagattctgcacctcggccttgaccttgctgcagatgttcag

SEQ ID NO: 1124 - DNA, 488 bp, Homo sapiens
aaagaatcagcaaaatttcaaataaaaaattatgaaaatattatcctcattagttcatttagtcccatgaaattaattattttctctgcttgatcttggtggacagtttcatgaagctgtcagttagttcattaaagttttggaaattctcagacagtgcagtggtatcagaaacttgtattcaagagtacaggtcagagtcttcttttcttttctttttgagatggagtcttgctctgttgccagactggagtgcagtggtgcgatctgggctcactgcaatctccacctcccgggttcaagcgattctcctgcctcagcctcccgagtaactgggactacaggtgcgcgccaccaagcccagctcatttttgtatttttagtagagatggggtttcacgatgttggctaggatggtctcgatctctggtcagagtcttttctgtaaatacccttggtaaagaagcaattttagactgtagctgttg

SEQ ID NO: 1125 - DNA, 500 bp, Homo sapiens; identical to SEQ ID NO: 245

SEQ ID NO: 1126 - DNA, 495 bp, Homo sapiens
cctacagacttatttcttcttggacacacccacggtgcggccacggcggccagtggtcttggtgtgctggcctcggacacgaaggccccagaagtgacgcagccctctatgggcccgaatcttcttcagtcgctccaggtcttcacggagcttgttgtccagaccattggctaggacctggctgtattttccatcctttacatccttctgtctgttcaagaaccagtctgggatcttgtactggcgtggattctgcataatggtgatcacacgttccacctcatcctcagtgagttctcccgccctcttggtgaggtcaatgtctgctttcctcaacaccacatgagcatatcttcggcccacacccttaatggcagtgatggcaaaggctattttccgccgcccatcgatgttggtgttgagtactcgcaaaatatgctggaacttttcagggatcactagagacatggctgcagcacaagcggcggcgtgtag

SEQ ID NO: 1127 - DNA, 516 bp, Homo sapiens
  misc_feature 504: n = A,T,C or G
ccgagatggcagatgagattgccaaggctcaggccgctcggcctggtggcgacacgatctttgggaagatcatccgcaaggaaataccagccaaaatcatttttgaggatgaccggtgccttgctttccatgacatttcccctcaagcaccaacacattttctggtgatacccaagaaacatatatcccagatttctgtggcagaagatgatgatgaaagtcttcttggacacttaatgattgttggcaagaaatgtgctgctgatctgggcctgaataagggttatcgaatggtggtgaatgaaggttcagatggtggacagtctgtctatcacgttcatctccatgttcttggaggtcggcaaatgcattggcctcctggttaagcacgttttggggataattttctcttctttaggcaatgattaagttaggcaatttccagtatgttaagkaacacacttatttttgcctgtgtatggagagattcaagaaataattttnaaaccgcataca

SEQ ID NO: 1128 - DNA, 453 bp, Homo sapiens
ctggagacacccacttgggtggagaagattttgacaaccgaatggtcaaccattttattgctgagtttaagcgcaagcataagaaggacatcagtgagaacaagagagctgtaagacgcctccgtactgcttgtgaacgtgctaagcgtaccctctcttccagcacccaggccagtattgagatcgattctctctatgaaggaatcgacttctatacctccattacccgtgcccgatttgaagaactgaatgctgacctgttccgtggcaccctggacccagtagagaaagcccttcgagatgccaaactagacaagtcacagattcatgatattgtcctggttggtggttctactcgtatccccaagattcagaagcttctccaagacttcttcaatggaaaagaactgaataagagcatcaaccctgatgaagctgttgcttatggtgcag

SEQ ID NO: 1129 - DNA, 461 bp, Homo sapiens
cctggtttattgaaaatgaagagcaggaatatgttcaaactgtgaagtcatccaaaggtggtcccggatcagcggtgagcccctatcctaccttcaatccatcctcggatgtcgctgccttgcataaggccataatggttaaaggtgtggatgaagcaaccatcattgacattctaactaagcgaaacaatgcacagcgtcaacagatcaaagcagcatatctccaggaaacaggaaagcccctagatgaaacactgaagaaagcccttacaggtcaccttgaggaggttgttttagccctgctaaaaactccagcgcaatttgatgctgatgaacttcgtgctgccatgaagggccttggaactgatgaagatactctaattgagattttggcatcaagaactaacaaagaaatcagagacattaacagggtctacagagaggaactgaagagagatctg

SEQ ID NO: 1130 - DNA, 529 bp, Homo sapiens
aaataaggcttggggtttttcccggtcttttggggaacttgaaactgaggtgggacttttcagaaactgttgctagtttcgctttatctgagtaccatctgttcttggccctgagccggggcccaggtgctcgaccacagatatcctgtttggcccctgtcccagttttgttcagccttattttttaactaaacttccttgtgacttttgagaactcagctctggtactttttcatgccttgcaaaatggcgttactgcagctagcttgctaagccttatggtggggtctttcattcccccctctttctggaaactgaataaaattttttatttacgcgattttactttttctggatttattgatttgagttggtgatactgttgggttagaactagggcctgcaccaccgaaattctgttttttacaaactggaccaagcggttgagaatgcagggtccgaggagtaggattaataaaagtactattagagggcccataatggtggatattagggtcgtgaaccatgg

SEQ ID NO: 1131 - DNA, 551 bp, Homo sapiens
gcaaagaatatccaggcagtgtttatgtatgtctgcagtgtttttactggctatatagaccacagagtccagaagtgacttggatgggatccccaggaaggatacttagaatttacttgacagactgaagattggtaaacatggtctcaagttgagttttgctgggaaattggttagcttcgctgcaaccttgtcatttctttcctgagtaattatatgcagacattggtagaggttttttgttttttcataaagaatattaacacaagggttgtatacaaagggaacatactcatttcttagtctttctgtagatcctagcacttgtaactgatgaaatgatttgcctcagggtcgatccttccttccttccttcagtccgtccatctgtccgtccgtccttccgtctttgatggactttcactcatgttgcccaggctggagagcaatggtgtgatcttggctcactgcagcctccacctcctgggttcacgcgattctcctgcctcagcctccggagtagctgggattacaggcatttgccaccacac

SEQ ID NO: 1132 - DNA, 499 bp, Homo sapiens
ctgcctgggggctttttaataaacttgtctcacctcgtcagccactactgtctgcagcccctttgcaaagtggatgcactgaatacagtccggacagacattgtgggggtctttttattaaatcaagaacattgttaaattcaattaaggtttactctgctgccttggcagacttacgatctcaacagttcatacgagcaggtgaaaggattataaatagaatttcgttaaagtggaacagacgacaagaaagccttttagcaagagggcatgctcactagtggttagtaagctgtcgactttgtaaaaaagttaaaaatgaaaaaaaaggaaaaatgaattgtatatttaatgaatgaacatgtacaatttgccactgggaggaggttcctttttgttgggtgagtctgcaagtgaatttcactgatgttgatattcattgtgtgtagttttatttcggtcccagccccgtttccttttattttggagctaatgccag

SEQ ID NO: 1133 - DNA, 483 bp, Homo sapiens
aaaaagcaatcctcaaactctctagccacagcagtaattaagattaaggtctgtcagtgggctgatcccctccaggtagcctccctcactccaagagaagatgtagagaaatatggatgacacatgcttgcattgtttttgtgtcaaaacacacacacacccacacacacacacaatataaggcagcccaaaggtctgtggcagaaaacactgcaaatgactcagtgatacactacatttgcaatctctcatttatacaaaaaaagaaacaagtttccagtttgttttcaacaaaaacaacaaagaaaaaagggatggacaaaaaggcatttatacaaatctagggtgaggaatacaaagaaacttgcttttaataataaaaaaagattaaagagataaataaaaaaaaactggttacagttaagaacataatttaacaacagatgaccataccctttgaggaaagctccaacaacctatttt

SEQ ID NO: 1134 - DNA, 495 bp, Homo sapiens
cctttgaggattggaataagacagagctagactcattcctgattgaaatcacagccaatattctcaagttccaagacaccgatggcaaacacctgctgccaaagatcagggacagcgcggggcagaagggcacagggaagtggaccgccatctccgccctggaatacggcgtacccgtcaccctcattggagaagctgtctttgctcggtgcttatcatctctgaaggatgagagaattcaagctagcaaaaagctgaagggtccccagaagttccagtttgatggtgataagaaatcattcctggaggacattcggaaggcactctacgcttccaagatcatctcttacgctcaaggctttatgctgctaaggcaggcagccaccgagtttggctggactctcaattatggtggcatcgccctgatgtggagagggggctgcatcattagaagtgtattcctaggaaagataaaggatgcatttgatcgaaacc

SEQ ID NO: 1135 - DNA, 537 bp, Homo sapiens
  misc_feature 528: n = A,T,C or G
ctgtgcttaaaagtaattgtttctctcactgtttatacgttattcatgattgatggctactataatgtcctctgggaaaagcttgacgattatgtctactacgttcgttcaacaggcagtattattgaatttatatttggagttgtaatgtttggaaatggggcttacactatgatgtttgagtcgggaagtaaaattcgggcttttatgatgtgcctacatgcatattttaacatctacttacaagccaaaaatggctggaagacatttatgaatcgtaggactgctgtgaagaaaattaattcacttcctgaaataaaagggagccgcttacaagaaataaatgatgtatgtgcaatctgctatcatgagtttacaacatctgctcgtattacaccgtgtaatcattatttccatgcactttgccttcggaaatggctgtacattcaagatacttgtccaatgtgccatcagaaagtatacatcgaagatgatatcaaggataattcaaatgtatctaacaacaantggatttat

SEQ ID NO: 1136 - DNA, 468 bp, Homo sapiens
aaatacggaaaaatttcttccaaacataatgggagtgtgaaaaagggtgttatttttgctacttactcttcacttattggtgaaagccagtctggcggcaagtataaaactaggttaaaacaacttctgcattggtgcggtgatgacttcgatggagtgatagtgtttgatgagtgtcataaagccaaaaacttatgtcctgttggttcttcaaagccaaccaagacaggcttagcagttttagagcttcagaacaaattgccaaaagccagagttgtttatgctagtgcaactggtgcttctgaaccacgcaacatggcctatatgaaccgtcttggcatatggggtgagggtactccatttagagaattcagtgattttattcaagcagtagaacggagaggagttggtgccatggaaatagttgctatggatatgaagcttagaggaatgtacattgctcgacaa

SEQ ID NO: 1137 - DNA, 572 bp, Homo sapiens
ctgtatgagagcttagtcttcattaacaaaaaaggatcaagacaatgccatcattcggcctctacccaaagtgaaaagactgctgtcagatagcacttgccttccccatattattcagctactgctgacctttgaccctatccttgttgagaaggttgctattttgttataccatatcatgcaagataacccacagttaccccgcctttatctgagtggagtatttttctttatcatgatgtacacaggttccaatgtgcttcctgttgctcgatttttgaaatacacacataccaaacaggctttcaagtcagaagagacaaaaggacaagatatttttcagagaagtatacttgggcacattctacctgaagcaatggtttgttacttagaaaattatgaacctgaaaagttttctgagatttttctaggagaatttgatactccagaagcaatctggagcagtgaaatgaggcgcctgatgatagagaagattgctgcccatctcgcggatttcacacctcgtcttcagagtaacacaagagcactttatcagtattgccccattccta

SEQ ID NO: 1138 - DNA, 535 bp, Homo sapiens
  misc_feature 526: n = A,T,C or G
aaaaacaggttttaaccttatgtaaaattacttttatactcgtgttaacattttcatctgtgccttttggtaatttaatttctattatgaatttctggtgcctatgagctagctatcacctacctgaaaggtgcttagaggtgaaggtactgtttctaaaaacacatcactgtgatacctttctatcctcacattttcaagcttgcctcttttctgttctttgtggatataacttaagcaattgtgttattcataaaggtttagaaatttcagtattcccaacactctatgtttctgattttataacagtagccatttttgaaagtcagatgtttggcctgttttatatgaataaagtttatttataaaatattataaaaaataagtaaataaacagaacattaataataaagttttggttcttcctattcctgactttcatataatgaaaattatcctattgatctaagtagaagttatcatagaaagtggacacgtataagactttccttcctttttttttatnacatatgag

SEQ ID NO: 1139 - DNA, 442 bp, Homo sapiens
gtcttgacccatggccgtgtccgcctgctactgagtaaggggcattcctgttacagaccaaggagaactggagaaagaaagagaaaatcagttcgtggttacattgtggatgcaaatctgagcgttctcaacttggttattgtaaaaaaaggagagaaggatattcctggactgactgatactacagtgcctcgccgcctgggccccaaaagagctagcagaatccgcaaacttttcaatctctctaaagaagatgatgtccgccagtatgttgtaagaaagcccttaaataaagaaggtaagaaacctaggaccaaagcacccaagattcagcgtcttgttactccacgtgtcctgcagcacaaacggcggcgtattgctctgaagaagcagcgtaccaagaaaaataaagaagaggctgcagaatatgctaaacttttgg

SEQ ID NO: 1140 - DNA, 497 bp, Homo sapiens
aaaaaatataaataacaatgttcaaggttttacagttttcttagtgtgtgtctttttaaggctttatgttgcagacccttcattaatggtacttgtaccctgccatcaggatacactgcccaccagcgaggaaggccactgtggatacattcctgagggggacacacactgatccatgttgcctcagcctgttaaaaactaaatgatcaaacaccctccaatcagttctcagtttcattaactttctttctactacaaagtaataatagaaaggggtacgtgtccagcagcattcgagctctcagaagatcaatcaggaagggcaagaaggaaaaaggcttcctcctggagagaatttttttcctttcatcaggaacaaacaccaataacccagatagttcaaacagtggtttgtactgaaacatttttcagattaaatagtgttgagagaaacagtgatcttttggttgggtattttagaagaggttaaagtggag

SEQ ID NO: 1141 - DNA, 499 bp, Homo sapiens
aaaatatattttggttattttgaatacagacattggctccaaattttcatctttgcacaatagtatgacttttcactagaacttctcaacatttgggaacgttgcaaatatgagcatcatatgtgttaaggctgtatcatttaatgctatgagatacattgttttctccctatgccaaacaggtgaacaaacgtagttgttttttactgatactaaatgttggctacctgtgattttatagtatgcacatgtcagaaaaaggcaagacaaatggcctcttgtactgaatacttcggcaaacttattgggtcttcattttctgacagacaggatttgactcaatatttgtagagcttgcgtagaatggattacatggtagtgatgcactggtagaaatggtttttagttattgactcagaattcatctcaggatgaatcttttatgtctttttattgtaagcatatctgaatttactttataaagatggttttagaaagc

SEQ ID NO: 1142 - DNA, 254 bp, Homo sapiens
aaactacaaaacttttaatacaaaatcgtatttatatatttataagtcatatacatgccctatctgtgattttagaaaataaaagctacacactgtacagacactcttaactcatagctgtaggcaacatttttggatggaatttcttccccaataaaattaatggcatattttatatacatgaaggctaaactgcaaaaagacagttcagtttcccagatatgcatctccttttagggcaagtttataaattt

SEQ ID NO: 1143 - DNA, 521 bp, Homo sapiens
agaaaagtctctgacctcgttgtctgaggtggtcctacagaaccggagaggattagatctgctgttcctaaaagaaggaggattatgtgctgccctaaaagaagaatgctgtttctatgcagaccacactggcgtagtaagggatagcatggctaagctaagagaaaggctaaaccagaggcaaaaattgttcgaatcaggacaagggtggtttgagggactgtttaacaggtccccatggttcacgaccctgatatccaccattatgggccctctgatagtacttttattaatcctactcctcggaccctgcattctcaaccgcttggtccagtttgtaaaagacagaatttcggtggtgcaggccctggttctgacccaacagtatcaccaactcaaatcaatagatccagaagaagtagaatcgcgtgaataaaagattttattcagtttccagaaagaggggggaatgaaagaccccaccataaggcttagcaagctagctgcagtaacgccatttt

SEQ ID NO: 1144 - DNA, 519 bp, Homo sapiens
ctgcaagacctcaaatgaccagtcacacaacatggtaccttctcccagcctgacccgtaagggctcagcagcagggacgtcaaccatgagcccagccacatccctaatccactaagctctcaggcaacatttgcaccatgtgacccaccatcaggcataggcgataggtctagtggagatcacctgacccaaaggtagccaatgggaaagttgagttatctggcgaactgagccaatcagattctctcctggaggtgccactgggagtgtggacccacagacagcggggaaagaatctgagccaatgtgggaggagaggagcaggcaggaaggtgggtcagagacttggggatcatggcaagcagaagcagtgaggaagcaggagtgccaaggagatggaagcaacaaggcaaaggaaagacgtgtagagcaaaggaaaataagggaaattttagtaagattgacaagcatctatactaaatttccttatagccgaggactttttttttttcaactcar

SEQ ID NO: 1145 - DNA, 560 bp, Homo sapiens
gaagcgcctctacccggccgtggacgaacaagagacgccgctgcctcggtcctggagcccgaaggacaagttcagctacatcggcctctctcagaacaacctgcgggtgcactacaaaggtcatggcaaaaccccaaaagatgccgcgtcagttcgagccacgcatccaataccagcagcctgtgggatttattattttgaagtaaaaattgtcagtaagggaagagatggttacatgggaattggtctttctgctcaaggtgtgaacatgaatagactaccaggttgggataagcattcatatggttaccatggggatgatggacattcgttttgttcttctggaactggacaaccttatggaccaactttcactactggtgatgtcattggctgttgtgttaatcttatcaacaatacctgcttttacaccaagaatggacatagtttaggtattgctttcactgacctaccgccaaatttgtatcctactgtggggcttcaaacaccaggagaagtggtcgatgccaattttgggcaacatcctttcgtgtttgata

SEQ ID NO: 1146 - DNA, 528 bp, Homo sapiens
gtgacagaggctcaaagaggttgtgatttgcagaagcatggctggttctgccactgctattgtaatgttatgcaagtccttcagtgggcctggaccttggctccttcctcggtaaaatggactgatggtaatcacagcgaatattttccaggtgcttcctacatgccaggcactatcctgagtacttcaagtgtctaatctatcctctcaacacctccataaattatatatgcaaagcgtaaaatatttactccctggaaaaacgtttgccaatccctggtttagatccttgaaaatttagaacatcttataattatatagcactttacaatatacaaagcaccttggcatacatcatcacatttaatctttgttttgtagggggataggcattcatgcattgtaaaggagaaagctaaaactcaagagtttaagtaacttgcttcatcaaggccacagagtcatacccaggttctgactccaaactgcatgctctttacatgaaactcctctgtctcccctaaatta

SEQ ID NO: 1147 - DNA, 316 bp, Homo sapiens
ggctactaggagaaggacgtacggtcctgctagtagaggaatatgtcgagtttctctagggcgccccagcaatgggccacttttgctagaatatggtatctcttagatgggaaaatgcagccacctggcaaacttgctgctatggcatctataagacttcagggattacataaacctgtgtaccatgcactgagtgactgtggggatcatgttgttataatgaacacaagacacattgcattttctggaaacaaatgggaacaaaaagtatactcttcgcatactggctacccaggtggatttagacaagtaacag

SEQ ID NO: 1148 - DNA, 566 bp, Homo sapiens
aaaaggcgctgggattcctctgcttctagatcaatgctgggctagaaaagtaaagtctgttctatcaggaatcacaagttggaactgagtattctccaaagtggaaattctagagtgtagtgtcactccaggcaaagattattcagttctcatccccagcatccacaactacctatcagaagggttaaaccaggtcaaaacagtccagcataattaggcttcatcaaacaatgtcattatgctcttctaagatgcaaataaaccaaaacaggaaatactaaaataaaaatatctgacactgccatacaaattgttagttcctttttgtatccccccttctataacattaacaaagggaatattttactgcaaagaatattttattttatacatcactagccatgaatttttgccattagttactatacaaatgctgcctagtgccattatccaaatagcacaaccattttacgtccacaattcacttctatagttacaagtagaattttcatgatttacttaagtacatctatcagtaaagatttaacactgagatgcaatctaac

SEQ ID NO: 1149 - DNA, 536 bp, Homo sapiens
ggggatccacatactgtgactgtttccatggacagcagtgaaatatccatgatcatcaattctatcaaagaagagtgttttcgatcaggggtagcagaggctcctgttggatcaaaggctcccagcatagatgggaaggaagaattagatctggctgagaagatggatattgctgtgtcttacacaggtgaagagctggattttgagactgttggagacatcattgccatcattgaggacaaggtagatgatcatcctgaagtgctggatgtggcagcagtggaagcagcactgtcattttgtgaagaaaatgatgatcctcagtccctgcctggcccctgggagcatcctatccagcaggagcgggacaagccagtacctctccccgcaccagaaatgacggkcaagcaagagagactggactttgaggaaacggaaaacaagggaatacatgaactggtggacatcagggagcccagtgcagagatcaaggtggaacctgcagaaccagagccagtcatttcaggagccgaaat

SEQ ID NO: 1150 - DNA, 431 bp, Homo sapiens
gtctccctcagcagggctaggtgcactacagcctctttccccgtgtcccgttggatctgagctgtgtagcacttgttgcattacaaagaaaaagacttctgcaggaaatagggtagagaacaggctgtctagtcagatgcagcttgatctgtggcaaaaccaagtgtggtctttcagcttcagtgtgttagcatcccagcacctgggatggggtttgtgggcaagttgattttgccacactgtagggcccaggtggtcccattgccaccgtgaagccaaattctagcccaagtctggtagagcagtcgggcagctagttttcgggggaggatgatgtggtgggacagaggacctcagtggcctattacggagccctcttcccagactaaattcatagccgagagctcggggggatggtagagttaaaattt

SEQ ID NO: 1151 - DNA, 546 bp, Homo sapiens
ctggtgcctgctggccctgggggaggaggcaaagctgtggctcccagcaagcagagcaaaaagagttcgcccatggatcgaaacagtgacgagtatcggcaacgccgagagaggaacaacatggctgtgaaaaagagccggttgaaaagcaagcagaaagcacaagacacactgcagagagtcaatcagctcaaagaagagaatgaacggttggaagcaaaaatcaaattgctgaccaaggaattaagtgtactcaaagatttgtttcttgagcatgcacacaaccttgcagacaacgtacagtccattagcactgaaaatacgacagcagatggcgacaatgcaggacagtagacctcaccctttccagactttagagcttgtggcttgaatgttaaaggtgtgaccaccgacaccactcatgtcaatggctgaaagttgtccatttccatgactcaaagacccattggaggctattttctgggatcagcactgaagagttgattagctaaaaatgttagccttgtaattcgaatatctggtttt

SEQ ID NO: 1152 - DNA, 552 bp, Homo sapiens
aaaaacatcatattaatatggtacttatcatgattactgttgagttaaattgtgtacccctcctcccaccaaattcatatgtcaaagtccaaatctccagcccctcagattgtgaccttatttggaaatagggtgatcgcagacataagtaattaaattgaggtgatactggagtagggtgagcccctaacccaatatgactgacatctttataaaaaagtgaaatttggacacagacacacccatggggaggatgccatgtgaagactgaagttatgctgccacgagccaaggagctaccagaagccaggagagaccgggagcaaatctgtcccttgtaccttcatgggagcacggccctgccagccctgtgatcttggatctctgccctctaaaactgagataatacatttttgtgtttaagccacttcattttggcacttggttctggcaggccccaacaaactaatgcaatccctgagctttctggcacccccttaagttttaggctcacttgcctcaccccggccccagccctggatcattctgtgg

SEQ ID NO: 1153 - DNA, 504 bp, Homo sapiens
attagatctgctgttcctaaaagaaggaggattatgtgctgccctaaaagaagaatgctgtttctatgcagaccacactggcgtagtaagggatagcatggctaagctaagagaaaggctaaaccagaggcaaaaattgttcgaatcaggacaagggtggtttgagagactgtttaacaggtccccatggttcacgaccctgatatccaccattatgggccctctgatagtacttttattaatcctactcctcggaccctgcattctcaaccgcttggtccagtttgtaaaagacagaatttcggtggtgcaggccctggttctgacccaacagtatcaccaactcaaatcaatagatccagaaaaagtagaatcgcgtaaataaaagattttattcagtttccagaaagaggggggaatgaaagaccccaccataaggcttagcaagctagctgcagtaacgccattttgcaaggcatgaaaaagtaccagagctgagttctc

SEQ ID NO: 1154 - DNA, 382 bp, Homo sapiens
aaaagcgctcagcatttaatctggttgtttgggggaaaagaaaagaaacaaagaaaggaaaaaaacaacaaaaaaacctcaccaaacaacctaacattttattagaaaaacaaagaacatgattttttttttaattaaaaaaaatgttgttgctgtttcattagaattgaaaacgggttttttctttctttctgagttagcattttggagtctttagtttgaagatgcttttgccctaccatgtctgtgaatgtctacattagtctactttgttagtaaaatttataaaaataggagtgcagcagctctttataataaatgtcgcattcagtgtctcatactggctgtgccttaagtaccaaatttataaacgtaacaattt

SEQ ID NO: 1155 - DNA, 503 bp, Homo sapiens
gaaacagtgaaggaattttatggagaaaatataaaagagtctcctgattatgaaaggatcatcaatcttcgtcattttaagaggatactaagtttgcttgaaggacaaaagatagcttttggtggggagactgatgaggccacacgctacatagccccaacagtacttaccgatgttgatcctaaaaccaaggtgatgcaagaagaaatttttggaccaattcttccaatagtgcctgtgaaaaatgtagatgaggccataaatttcataaatgaacgtgaaaagcctctggctctttatgtattttcgcataaccataagctcatcaaacggatgattgatgagacatccagtggaggtgtcacaggcaatgacgtcattatgcacttcacgctcaactctttcccatttggaggagtgggttccagtgggatgggagcttatcacggaaaacatagttttgatactttttctcatcagcgtccctgtttattaaaaagttt

SEQ ID NO: 1156 - DNA, 517 bp, Homo sapiens
aaaccagattttggagcagaaagtatctacggcggcttcttattgggagtcagatctgtaaatggcttagccttctatgactgggacaatacagaactcatacgaagaattgaaattcagcccaaacatattttctggtctgactctggagagctagtctgtattgctactgaggaatcattttttatccttaagtatctgtcagaaaaagtcttggctgcacaggaaacacatgagggagttactgaagatggcattgaagatgcctttgaggttcttggtgagattcaggaaattgtgaaaacagggctttgggtaggcgattgcttcatttacacaagttctgtgaacagattaaattattatgttggaggagaaatagtcaccattgcccacttggacaggacgatgtatctcctaggctacattcctaaagacaacaggctttatctgggggataaagaattgaacatcattagctattccctgctggtttcagtcctggaataccagacag

SEQ ID NO: 1157 - DNA, 475 bp, Homo sapiens
aaataaggcttggggtttttcccggtcttttggggaacttgaaactgaggtgggactttccagaaactgttgctagtttcgctttatctgagtaccatctgttcttggccctgagccggggcccaggtgctcgaccacagatatcctgtttggcccctgtcccagttttgttcagccttattctttaactaaacttccttgtgacttttgagaactcagctctggtactttttcatgccttgcaaaatggcgttactgcagctagcttgctaagccttatggtggggtctttcattcccccctctttctggaaactgaataaaatcttttattcacgcgattctacttcttctggatctgttgatttgagttggtgatactgttgggtcagaaccagggcctgcaccaccgaaattctgtcttttacaaactggaccaagcggttgagaatgcagggtccgaggagtaggattaa

SEQ ID NO: 1158 - DNA, 469 bp, Homo sapiens
aaaagaacgcactcaggatgaaatagaaaggacaaaacagttctccaaggatgtcgttgatttgctgcgtcaccaaccccatttccggatgccctttaataaatttatcccttcttaccatcaccactttggccggcagtgcaaacttgcgtactatgggtttaccaaactacttgaactttttgaagccatacctgatactttacaagtattggaatgtggagaagaaaagatccttactctgacagaggtggagcggttcaaagctctagctgcccagtttgttaaactccttcggtcccaaaaagataactgccttatgatgacagatctccttacagaatatgctaaaacttttggttatacatttcgtctccaagactatgatgtcagttccatttcggctttaactcagaaactctgccatgtcgtgaaggttgccgatatagaatctggcagacagattcag

SEQ ID NO: 1159 - DNA, 487 bp, Homo sapiens
ttggaagtgcagttatatcaaaagaaaatacaggacctttcagataatagggaaaaattagccagtatcttaaaggagagcctgaacttggaggaccaaattgagagtgatgagtcagaactgaagaaattgaagactgaagaaaattcgttcaaaagactgatgattgtgaagaaggaaaaacttgccacagcacaattcaaaataaataagaagcatgaagatgttaagcaatacaaacgcacagtaattgaggattgcaataaagttcaagaaaaaagaggtgctgtctatgaacgagtaaccacaattaatcaagaaatccaaaaaattaaacttggaattcaacaactaaaagatgttgctgaaagggagaaactgaagtcccaggaaatatttctaaacttgaaaactgctttggagaaataccacgacggtattgaaaaggcagcagaggactcctatgctaagatagatgagaagacag

SEQ ID NO: 1160 - DNA, 453 bp, Homo sapiens
aaagaaaggtttaataaagagttaaatatcaaatagacaacttcacttctaaatttcactttgtcactcacactgaattggaattgaacaatggctctctcttcaggcggtcctgtactggaaattctggaaactggtaaaatatattttgataagagtttcaagttaatgacctatttccatgcagtacccaatgctgcctttagatgaagtcacattcagtctgctttgaaatgaaatagctttaagtaatctgttctgccaggctagaaaaatgtcaccaacattttgctgatgcatggagatgtggcagtaataaactactatttagagaggaagagaattggagcagaagtgactgggcaacagtttcaagagaagcaaaagccgggagagggaaatcaatgaaaacatgcacaagattaggcagagtaatatgcacaattagtgcag

SEQ ID NO: 1161 - DNA, 622 bp, Homo sapiens
  misc_feature 615: n = A,T,C or G
ccagtttggagaacgcgctgacatactgctcggccacagtcagtgaagctgctgcatctccattatgttgtgtcagagctgcagccaggattcgaatagcttcagctttagccttggccttcgccagaactgcactggcctctcctgctgcctgatttatctgttcagccttttctgcttcggaggccaggatctgggcctgtttcttcccttctgccacattgatggccgactctcgggtcccctcagactctagaactgtggcccgtttccgccgctctgcctccacctgcatctgcatagactctttcacccggggtggcacatggatatccttgatctcataacggaggcagcggataccccagcagtcagcagcttggttgatggcatccacaatgctggcattcagggactcccgttcccggaagactttgtccagagagagtttgccgagctctgatctcatggttgtttgagctagctgggtgacggcatactcagggtcctccacaccgtagcttgccttgtaagggtccatgatgcgcaggtaaaggactccatcgatttgcagagttacattgtcgagagtcacagccgactgctcaggcmcgntgatgac

SEQ ID NO: 1162 - DNA, 488 bp, Homo sapiens; identical to SEQ ID NO: 1046

SEQ ID NO: 1163 - DNA, 493 bp, Homo sapiens
gccaagaagaagctggctgccacgcccaagaaagccaaaaaacccaagactgtcaaagccaagccggtcaaggcatccaagcccaaaaaggccaaaccagtgaaacccaaagcaaagtccagtgccaagagggccggcaagaagaagtgacaatgaagtcttttcttgcggacactccctcctgtctcctattttctgtaaataattttctccctttttctctcttgatgctcaccaccaccttttgcccccttctgttctgactttataagagacaggatttggattcttcagaaattacagaataattcatttttccttaaccagttgtgcaaggacagcaacaaccaatctaatgatgagaatgtacttatattttgttttgctattaacctacttacggggctagggacttgcggggggggcttgtgtgttttgttggcttgtttgccatgaaggtagatgtgggtggggagaagacacaaggcagttt

SEQ ID NO: 1164 - DNA, 346 bp, Homo sapiens
cctgggcttgaaatttgctgagctggtgtataccggtttctggcacagccctgagtgtgaatttgtccgccactgcatcgccaagtcccaggagcgagtggaagggaaagtgcaggtgtccgtcctcaagggccaggtgtacatcctcggccgggagtccccactgtctctctacaatgaggagctggtgagcatgaacgtgcagggtgattatgagccaactgatgccaccgggttcatcaacatcaattccctcaggctgaaggaatatcatcgtctccagagcaaggtcactgccaaatagacccgtgtacaatgaggagctggggcctcctcaatttgcaga

SEQ ID NO: 1165 - DNA, 482 bp, Homo sapiens
cctaggggatgtctttctcgagcctgtgctggtctaggaagcctcttctttaggaatcatttttttgtcccccgtgaacttaccctccccagatgagtcaagcagtctctggtcctgaggtcccatgggttgccagtggcagttcagggacagaggctggaaggagtgaaaatggagaggaataaagggctggggctggtctggtgcaggcagaagagggaatcagagaagcataaaacatggagaaaaagatgagaaggaagtggaaagaagagagtggatatcaacaatggccttaggctcctttcatgcacctgtttatttaacaaaacgtttagggcctatcctgcactgggactcctctagttacgccaggaaaggttgtcaggggagtctgtgatggggaaaagagaggccccattctgggtttggctcttctgagtcatcggctgtggaagtgactgaraagtgagtttctgggt

SEQ ID NO: 1166 - DNA, 409 bp, Homo sapiens; identical to SEQ ID NO: 85

SEQ ID NO: 1167 - DNA, 545 bp, Homo sapiens
  misc_feature 529: n = A,T,C or G
ccaccattttgaagaccaccacagatctcaaggcatgagactactcaccaacaaaatctatccctgctattgcacctagtgtcatctcaatatgtggctgacagcaaatgttctaacttaatctgatagatgctcctttagcatataaaagagcttgctaagtccctattacctgtagcagtctatcaactaaatatttaagaagtcatttcatagacaaggtttatgaatgacttagaagtaaaattagtaatttctaaaccactgtagtgttttctatgtttttagagatattccaaacacagagttttcaaaggagctgtaaaaccaagtacaaacatacgtaagtaattttgtcatggatatttctgtactaatttgggggagactggtgggccataaataaatgaaatacacatcctaaaaataatggtaaaaataatcaagtaccactttcagatggttattcaagtatcaacttggtatgcaagtaagttcacccatgtcttcacctatgatttcatattcnaagcgctacatcttac

SEQ ID NO: 1168 - DNA, 476 bp, Homo sapiens
ccttttcctctcggaagtcccctccctctcccgagagagagagctgcttttttttccttttttttttttttttttttttkgaratcgagttttgctctgttgcccagtgcagtggcatgatctcggctcactgcaacctccaccttccaggttcaagcgattctcctgcttcagcctcccaagtagctggaactacgggtgcgtgctaccacacccagctaattttttatgtaragacggggtttcaccgtgttagccaggatggtctcgatctcctgacctcgtgatccgcctgcctcggccttccaaagtgctgggattacaggcgtgagccaccgtgcccggcctcaactttttatttattagcttgttggtcttcaacctctgtaagcctcagtttcctcacttatcaatcatctactactgtatagagacaggtccatctcctarcatgcagggtgaggctaatgtgacat

SEQ ID NO: 1169 - DNA, 488 bp, Homo sapiens
aaagaatcagcaaaatttcaaataaaaaattatgaaaatattatcctcattagttcatttagtcccatgaaattaattattttctctgcttgatcttggtggacagtttcatgaagctgtcagttagttcattaaagttttggaaattctcagacagtgcagtggtatcagaaacttgtattcaagagtacaggtcagagtcttcttttcttttctttttgagatggagtcttgctctgttgccagactggagtgcagtggtgcgatctgggctcactgcaatctccacctcccgggttcaagcgattctcctgcctcagcctcccgagtaactgggactacaggtgcgcgccgccaagcccagctcatttttgtatttttagtagagatggggtttcacgatgttggctaggatggtctcgatctctggtcagagtcttttctgtaaatatccttggtaaagaagcaattttagactgtagctgttg

SEQ ID NO: 1170 - DNA, 453 bp, Homo sapiens
aaagatcagtcttagtgtttgttcagtcctgttacaaaatagataactgagcacctatcgcataacattttgcggtggcttttagccatgctggggttagatgtgtttgagagtcaaatgaaagctatggatcttctcagcaattaaaaaaaatgcatatattcacattcacagaaacattggcagaacccagttttaatggtacagaggagtagtttatagtgttgatttcaccaaaatcagagggctgaaagagacacttctatagactgcatcctgagcctagtgcagggcttgtctagctaatgtgggcagccaccacccactgtgtatgaacaagtctgaagcaagttggccttgcccttgagagtatatggggaccagtcttcatgtcttggagtaatwtgtcaaatgttaccctttttgatcagggtgtagggggaggatattgct

SEQ ID NO: 1171 - DNA, 562 bp, Homo sapiens
  misc_feature 522: n = A,T,C or G
gcagacatcttcacggtctttgccaagacaccagttacagatccagccacaggagccgtgaaggagaagatcacagcttttgtggtggagaggggcttcgggggcattacccatgggccccctgagaagaagatgggcatcaaggcttcaaacacagcagaggtgttctttgatggagtacgggtgccatcggagaacgtgctgggtgaggttgggagtggcttcaaggttgccatgcacatcctcaacaatggaaggtttggcatggctgcggccctggcaggtaccatgagaggcatcattgctaaggcggtgagtaccctgcccgagtccctaggtaacccaaacagaagtctcactgtcccccttgccatgtgtccctgatcacttgcaggcactccctacactagaaactcctcccctaccagcagcccgacttgctagcttaggtctccatccagcgtagactgaactctggttgtatgcaaaacccatccctctggcgcaagcccagcccctctnctagggagactgcagaccacactgaaccacagcgggatgt

SEQ ID NO: 1172 - DNA, 160 bp, Homo sapiens
tactagcatttacttgagcacagactgtgcaggattctgccacatactgaagagttctgtccctgtttaacatgtagtaggggcttttttctctgtcaaggagcgcctttattttttgagggctgagatgggtgagtctatgaagggagtttaataattt

SEQ ID NO: 1173 - DNA, 560 bp, Homo sapiens
ggaatgcctgcggggtgatgttgatattctaatggagttcctgctcaatgtcaccacagcaccagaatttcgtcgttgggaagtagctgaccttcagcctcagctaaagattgacaaagctgtggcctttcagaatccgcagactcatgtcattgaaaatttgcatgcagcagcttaccggaatgccttggctaatcccttgtattgtcctgactataggattggaaaagtgacatcagaggagttacattacttcgttcagaaccatttcacaagtgcaagaatggctttgattggacttggtgtgagtcatcctgttctaaagcaagttgctgaacagtttctcaacatgaggggtgggcttggtttatctggtgcaaaggccaactaccgtggaggtgaaatccgagaacagaatggagacagtcttgtccatgctgcttttgtagcagaaagtgctgtcgcgggaagtgcagaggcaaatgcatttagtgttcttcagcatgtcctcggtgctgggccacatgtcaagaggggcagcaacaccaccagccatctgc

SEQ ID NO: 1174 - DNA, 542 bp, Homo sapiens
ccaccaaacaattcgagcagctccaggcagccatacatacagaccttggggccttagaaaaatcagtcagtgccctagaaaagtctctgacctcgttgtctgaggtggtcctacagaaccggagaggattagatctgctgttcctaaaagaaggaggattatgtgctgccctaaaagaagaatgctgtttctatgcagaccacactggcgtagtaagggatagcatggctaagctaagagaaaggctaaaccagaggcaaaaattgttcgaatcaggacaagggtggtttgagagactgtttaacaggtccccatggttcacgaccctgatatccaccattatgggccctctgatagtacttttattaatcctactcctcggaccctgcattctcaaccgcttggtccagtttgtaaaagacagaatttcggtggtgcaggccctggttctgacccaacagtatcaccaactcaaatcaatagatccagaaaaagtagaatcgcgtaaataaaagattttattcagtttccagaaagagggg

SEQ ID NO: 1175 - DNA, 536 bp, Homo sapiens
aaatatcacaagtaggtcttaagtgtcatctggcatcttctttctgtagccaggtaactcttagatcttattcatcagcctgctgaacagttcctttttcagagacatagataccatccaaaaatttcctgatatccttgtttttaactgttgtggcttgctgaatcaaagccgctgaatttgaaacaagctcaatgtcatttccttcaaggattaattcatctttctgggcttgagatactgaacaagcaacacctggtctcatccgaaccctgcggatgtatttttcacccaagaaatttcggatttcaacaagagacccattctcctggataacaacgttgatggggaagtgagcatacacagacctcatcttgtaacggaagcccagtgtaacacccttgatcatgttctgtacatgactacaaatagtccgaacggtagccagttcctttctgttaccccaccatttgtcaacccggagcctcttttttttctttccaagaaggctgagttctacattgatgtgattgaag

SEQ ID NO: 1176 - DNA, 464 bp, Homo sapiens
ccatgttccatcattaatgttccaacatcaccagggacacaaagctcagcatgagggcttctacccaaatctccctacgacaggtacttcttcaactcttccaccacctcttgaggctcagggaatttgagtttgcgtgggggccccttcttaatcccagtccagagctccgcactgctgccgtccgggcgcagcagcgtcacctcgaagctgcccctccggggcttcgtcgggttcacctttactggaagctctggggcctccaggcgcagcgcctggctcagggccgcggcgttgcgcccatagacgcgtcagctagtgcaatgctcgataacaacggtcgcctcctccattccctccccgccgttcgccagcttctctcgcttctcggctacggcgaccaccgcggcctcagccttacgcttcctcccgcggggagccatggcgcctagagcccggccgag

SEQ ID NO: 1177 - DNA, 557 bp, Homo sapiens
aaatagaagttttatcttagaggattcttcactgaaagctcatcagtcaagtcctaagaccatggatctgacaaaaacccatgttaaaacagcaacccgtaaaacagtctgctgcctatattagaaattacccagtaattgtgtcaaaaagctgttaacacaaaaaatgtacatattaaacaagcaaatccttccaaatgtatcatcaaccccactgtaaaagattgcacatgatagtcttcattttgtctgtaaggggaacaacaacaacaaaaaaacccagtcttcagatgcttgattcagtcgaacctggaagtgccacagccgaggcaggcactcgctctagttcaatgccatcaatgcccaatggcacaagctgggtgctgagggcatgacaagtgatggggaatcccaaatgtcacatctcagtcacaaatttctgccgtcagaggggactgggttgcatgtacaacacgggtggggagcccacactacttgaaggacttcggaaatgcgtgtcaaaggagcttggtgtgatcccaatcacggtatcattc

SEQ ID NO: 1178 - DNA, 229 bp, Homo sapiens
aaagaaagatttaataaagagttaaatatcaaatagacaacttcacttctaaatttcactttgtcactcacactgaattggaattgaacaatggctctctcttcaggcggtcctgtactggaaattctggaaactggtaaaatatattttgataagagtttcaagttaatgacctatttccatgcagtacctaatgctgcctttaratgaagtcacattcagtctgctt

SEQ ID NO: 1179 - DNA, 503 bp, Homo sapiens
ctgctcccgagacgagccctcagtggctgccatggtctaccctttcactggggaccacaagcagaagttttactgggggcacaaagagatcctgatccctgtcttcaagaacatggctgatgccatgaggaagcacccggaggtagatgtgctcatcaactttgcctctctccgctctgcctatgacaacaccatggagaccatgaactatgcccagatccggaccatcgccatcatagctgaaggcatccctgaggccctcacgagaaagctgatcaagaaggcggaccagaagggagtgaccatcatcggacctgccactgttggaggcatcaagcctgggtgctttaagattggcaacacaggtgggatgctggacaacatcctggcctccaaactgtaccgcccaggcagcgtggcctatgtctcacgttccggaggcatgtccaacgagctcaacaatatcatctctcggaccacggatggcgtctatgagggcgtgg

SEQ ID NO: 1180 - DNA, 523 bp, Homo sapiens
aaaaaacttcgaaagtcacagacacagaatttaggaagctgaaggctgagagtctcccttctcacttaatccatgctttattttgcattcctcacaggtaaggaggcagtgcctgttatgctgtggaccaaaaccagccccacggagctgatcttcaaaaaaatggaatttactctggcatactcctatgtatgatacctttccaaggccaaatcccaagagaccagcaagtgcaactttgggcaatgatccaaatctagaattagctgccaaataaccttggtagactagtccctgggtgacaagcatgcttacaagagaaaaaggcagagctctcttccagaaactttcttcctgacattctcgcataatctttgagatctctgctctgtggatgtgcagttttgattttggacaaaacaacaggctctgcttgcttggtggtggaaaatgggcatctttatcttggtttccacgagcagacgctgaagccatgatgactttgtgcttgctctccttccag

SEQ ID NO: 1181 - DNA, 338 bp, Homo sapiens
ctgaaaattcacctgaatgcacattactaatccaggttaggcaccaagagggaacctgaagagggacacaattctcagaaacatgaatattggaagtcgctgggagatgggacaaagggagggagggcagagaggtgttgctcagccttcagcctgacccccagtgccctgccatctagtacatacgtcagggtttccttagcatcagggcgggtgaatctgaattgttccagctccacctagaagcacagaaagctcagcccttacagtctgacacacagaaacaaacaaaacatccaaatgacccaagataaccacaccatcttgttgctgggagg

SEQ ID NO: 1182 - DNA, 476 bp, Homo sapiens
cctcctcatcctcctccttcaggcgcggcctctatggtgcctggggctcccccgccttctcaacaacctgggacgggggacaggctgctaaacctagtaaaaggagcctatcaagcactcaacctcaccagtcccgacagaacccaagagtgctggctgtgtctggtatcgggacccccctactacgaaggggttgccgtcctaggtacctactccaaccatacctctgccccagctaactgctccgtggcctcccaacacaagctgaccctgtccgaagtgaccgggcagggactctgcgtaggagcagttcccaaaacccatcaggccctgtgtaataccacccagaaggcgagcgacgggtcctactatctggctgctcccgccgggaccatctgggcttgcaacaccgggctcactccctgcctatctaccactgtactcaacctcaccaccgattactgtgtcctggttga

SEQ ID NO: 1183 - DNA, 488 bp, Homo sapiens
  misc_feature 416: n = A,T,C or G
cttttttttttttttttttttttttttctttgtttcaagttttaatcaaagcttgtatataarattactttattcctgcatcttctcaatggtttcttccttgtatttgcccttttcctttcctacttggcgaratttggctttccgttcgaggatctttttgcggtctttgtccagttttagcctagtgataaccaccttgctggggtgaatgcctacgtggacagttgtgccattagccttttcccgctgcacccgttcaatgtarataacatatttcttcctgtaaacctggactactttgccaatttgctgacctttatagkgtccacgtacaacctgaacttcatcatcctttcggatgggcatggatcgcacgttgtacttctgtctcarctctttggaaagaggggaanracataawtcttccttcraatgtgggaaggkgcattgaaatgccttttgcgattcttgcttcggtcggaagt

SEQ ID NO: 1184 - DNA, 573 bp, Homo sapiens
  misc_feature 462: n = A,T,C or G
aaaaatccttttaattttatctagggataaccactcacatcatggctaagttgcaaggaacttcaaaactttgaaaaagaatttcatccctgagaagtgagagatagaaaaatatctaaaaaaagagaagcaacagtcttgcacccttttaacaatctcaccacagcatgaactactattaacactgagcaatcagatattccagtcctggagagttactgcctttcatgatctgatcttttgtaatgaaactacaagtgcaacattaaaaaaaaacagataaatagaaaccctggttttattttcagctttacatttttgacaagtgcaaggtcagccagctaagatataaatattccaataatgaccaaagtaataacttctactggcatgtcctcttctgagtctccattttctccactgatattcatccaaataataaaagtaacacaattgcaattnagtttactattatcaatggcactctcatcacggttcttacagatcgaataaggttcattagctgtgatttaattcccggctcttctccaaatccaccaattccctggtctg

SEQ ID NO: 1185 - DNA, 507 bp, Homo sapiens
ctgaattagctcaacagttacatcttcgttctccaccaccacaagcaggtccatgatcctctcctgcatctcccgacctgttttatagagtttctgcagaagctctatgtcttcatggttttcagacccaggagtattctccatcaatatggcggacatcactcgcacattcattttcaccatatccaattcactgtgcagttttccaatctgttctgggaccaatgtaacagtcgagttctttggagcaattacagaagaaagagctggtgcagtagggacagatgttggaggatttgatgagatttgagcagtctcttgtcttgctgtttcagcctctgcttctgagggaggaaactgaacgcctttcttaaccaggtcgaggtatacttctttgacttcgcttacatccacacctcctgggaagccctgtgaccaagtcttaatgaaattcaagattctattctgaatgtctaatggcaagttgtatctgggattcagtagctt

SEQ ID NO: 1186 - DNA, 580 bp, Homo sapiens
  misc_feature 559: n = A,T,C or G
aaaggagattgtttcaaaatatttttgcaaattgagataaggacagaaagattgagaaacattgtatattttgcaaaaacaagatgtttgtagctgtttcagagagagtacggtatatttatggtaattttatccactagcaaatcttgatttagtttgatagtgtgtggaattttattttgaaggataagaccatgggaaaattgtggtaaagactgtttgtacccttcatgaaataattctgaagttgccatcagttttactaatcttctgtgaaatgcatagatatgcgcatgttcaactttttattatggtcttataattaaatgtaaaattgaaaattcatttgctgtttcaaagtgtgatatctttcacaatagcctttttatagtcagtaattcagaataatcaagttcatatggataaatgcatttttatttcctatttctttagggagtgctacaaatgtttgtcacttaaatttcaagtttctgttttaatagttaactgactatagattgttttctatgccatgtatgtgccacttctgagagtagtnaatgactctttgctacatttt

SEQ ID NO: 1187 - DNA, 520 bp, Homo sapiens
aaaaattaagaactttgaggttttcttcatgttgtaaacataacttagaccttgttggcattaagtttacaaaagaaaatattaaaccatgatttttatcatcctgcccatgtcagtatacactctctttattatgagaatgaaaccaaataataagcaaaatacatcaggaatttcaaattgtactgcaaagaaggtcccaggagaagccttctttttctatgggaaatcacttctggagttggcaagaatggagaatggtgtgttgggaaacgccttggaaggtgtgcatgtggaagaggaagaaggagaaaaaacagaagatgaatctctggtagaaaataatgataacatagatgaaactgaaggctcggaagaggatgataaagaaaatgataagactgaagaaatgccaaatgattcagtccttgaaaacaagtctcttcaagaaaatgaggaggaggagattgggaacctagagcttgcctgggatatgctggatttagcaaagatcattttt

SEQ ID NO: 1188 - DNA, 543 bp, Homo sapiens
cgaccccgtacacgcctgcctatctccattacaccgaaacagatctaaaaagattgcgagaactgggggccacctataatcagataaaaggatattgggtcctacaaggcaagccggtgatgcccgatcagtttgtgtttgaattattagactcccttcatagactcacccatctcagccctcaaaagatgaaggcgctccttgacagagaaaaaagcccctactacatgttaaacagggacagaactcttcagtatgtggcagaatcctgcacagtctgtgctcaagtaaatgctagtaaagccaaaatcggggcaggggtacgagtacgcggacatcgaccaggtacccattggaaaattaacttcactgaagttaaaccagggctgtacgggtacaagtacctcctggtgttcgtagacaccttctctagctgggtgaaagccttcccaactaaacgtgaaactgccaaggttgtgaccaagaagctattaaaagaaatattcccaagattcgggatgccacaggtattgggttccgata

SEQ ID NO: 1189 - DNA, 527 bp, Homo sapiens
aaataggtacagaagagcttgggtgctcaaaatttccaaattcaaaggtgataaaaaagaaaaaccctgttttgtacttttatcaaaatccatcataaaagggaaagaagactacaaagttttgcctaaatataacaactagagctagatttgttgtgggggaaggggctctcagagcttctctgccgctctctcctcccaccccccaccgacactgaccactggaatcttcaggttcttgaggagttccaaggctgaggtcagaacgggcatgggaggcagcagacacagcactgccctgctccccctccaatgttgctgcttgcctcaatgagcctccaacccaactgctctagaggagagtggatgggctgaaggagaagccagggaagttagagcaaacacattatcatagaaactgtactgtacatgtgctaaagcaagatgtcaggagtatcttacaagatgttctttatacaatatcactgctgaaacaagcaacttttaataactagaaaagtcaattt

SEQ ID NO: 1190 - DNA, 572 bp, Homo sapiens
aaatcagattttttaatcaactaaaacagctatgagttaagtacctgccctgcaaaaatttttagaaaaagttttaggattatgaaattaagaattattttcataatcctaaaactttttctaaaaatttttaggattatgaaattaagaattattttccttaactggaacagttctaaaatttatctgatacttctctaacaagtgagtgatctcatgtaaccccagtttgtatcttaaaggctgcagcatagaattgagctgtataacagtgttagaactgtcaagtgataatcacagaacagtttgtatcggttttataattctcatgtcttgatcagatctgaaggaaataggcataccctccaacattctaaaaattatttatttttattaggatttgtttattaaagttccacgagctgctttatggtcagttgggctgagtagtagatatcttaaagacatgcagtgaaagtgaaccctgtcatatcatggtgcctctttcaaggttcctctgtaagttcctcatcttgcagaattatttcaataccaaggtatggttgaaccag

SEQ ID NO: 1191 - DNA, 505 bp, Homo sapiens
aaaggaaactgtaagttacactgtggttaagacttgtatcttcacccttgaaaaagcccacattctatcacagtgatgtatggtcagacttaacagccccaattgttaaacacttggatcaagtcataaccagttttattgcaaaaggaccctgtacacatttatcaactctagtaccttaatagctacccaacaagtcattaacatacagaaacatgcatcatgagaagcaagaagtatcacccatcccttctgcatattagcaacttgtcactcctgagcaacagtgctcacatcactgaggtctgtgaacagtcacttttcgcattcatcctgagtgaaagatggaatgacttaagtacaaatgcaacatattataaacaatttcttacaaaaaaagtcacaaattaaaccaaagtattttacagaatttactacaaaacgccataaaaactgccttcacttaagctctctctccccgtatccggcgagccaaacctcggcc

SEQ ID NO: 1192 - DNA, 535 bp, Homo sapiens
ccttctaattagcatcagaaagttcctggattcccaggcacgcctcctgaaaaagctgagagatatgtctctttccagtcttcttgggtgaggctaggttgcaagctctgggctgttcaaaggttgccagaatctctccattggagggatagaagcagtgtccctattctgacttgtcagagagtgagcttgtgacccttgaaaggtggtgggtatcccttctcatcccctcggacctccacagttgatgcgtatgtctcccaggggaattaggtcacttaactcaagagcaatgtttgcccaggagcaagcaatgctggggagctttcctctagattggaaatggttcttgttgccctaccaggaaaagaattaagaaaacaaccctaaccattgtctcagtactttgtactgattgaagaaaaccacctctctgacaagcgctaatagcatctactacatttaatgtcatagattcttatttagcaagtgagttggattcgttgcaaacattcacaacttccattcaragagg

SEQ ID NO: 1193 - DNA, 603 bp, Homo sapiens
aaaccctaattagccaccaaaaaaggttagtgcataataacctttcaaagttaaacaaaagccacaaaaattttgccacaaggcttaaaggattatctatttcaaatgctcatttccagatgtaactataagaatgttaatttgtcatgtcaacaaacaagaccataagtagatccatcatgttggaggattttaatgacatttaggatattcttgccacaataacgtgcaatcagtgcatttcctacatggctctattacggcaatgaatcaaattatagaaatactataagtgaacttacttaataaaggatatcatacgacataaacaatccatgcctgctgtagatgcatgcagcttttcatttttgttatgaagcagcaccagaatagtaaaactgcttggttactcaatcagatttcaccatgacaagaattggttacctcgtaccattttctaaaagctttttgatgtaaataactaatatgagtaacaggagctttataaccatttataactcagagctgtatacatctaggtttgagatgaacaaatacagcatttagaaatcacacaaaggaatgacactgatgcaggtatac

SEQ ID NO: 1194 - DNA, 516 bp, Homo sapiens
gtgcgagatagtagtagggtcgtggtgctggagtttaagttgagtagtaggaatgcggtagtagttaggataatataaatagttaaattaagaatggttatgttagggttgtacggtagaactgctattattcatcctatgtgggtaattgaggagtatgctaagattttgcgtagctgggtttggtttaatccacctcaactgcctgctatgatggataagattgagagagtgaggagaaggcttacgtttagtgagggagagatttggtatatgattgagatgggggctagtttttgtcatgtgagaagaagcaggccggatgtcagaggggtgccttgggtaacctctgggactcagaagtgaaagggggctattcctagttttattgctatagccattatgattattaatgatgagtattgattggtagtattggttatggttcattgtccggagagcatattgttgaagaggatagctwttakaaggattatggatgcggttgcttgcgtg

SEQ ID NO: 1195 - DNA, 474 bp, Homo sapiens
taatcctactcctcggaccctgcattctcaaccgcttggtccagtttgtaaaagacagaatttcggtggtgcaggccctggttctgacccaacagtatcaccaactcaaatcaatagatccagaagaagtagaatcgcgtgaataaaagattttattcagtttccagaaagaggggggaatgaaagaccccaccataaggcttagcaagctagctgcagtaacgccattttgcaaggcatgaaaaagtaccagagctgagttctcaaaagtcacaaggaagtttagttaaagaataaggctgaacaaaactgggacaggggccaaacaggatatctgtggtcgagcacctgggccccggctcagggccaagaacagatggtactcagataaagcgaaactagcaacagtttctggaaagtcccacctcagtttcaagttccccaaaagaccgggaaaaaccccaagccttattt

SEQ ID NO: 1196 - DNA, 572 bp, Homo sapiens
aaaagtttgtcccagacctccagttataatgcttctatggcagattccccaggtgaagagtcttttgaagacctgaccgaagaaagcaaaacactggcctggaataacatcaccaaactgcagttacacgagcactataaaatccacaaagaagcagttactggaatcacggtctctcgcaatggatcttcagtattcacaacatcccaagattccaccttgaagatgttttctaaagaatcaaaaatgctacaaagaagtatatcattttcaaatatggctttatcgtcttgtttacttttaccaggagatgccactgtcataacttcttcatgggataataatgtctatttttattccatagcatttggaagacgccaggacacgttaatgggacatgatgatgctgttagtaagatctgttggcatgacaacaggctatattctgcatcgtgggactctacagtgaaggtgtggtctggtgttcctgcagagatgccaggcaccaaaagacaccactttgacttgctggccgagctggaacatgatgtcagtgtagatacaatcagttt

SEQ ID NO: 1197 - DNA, 478 bp, Homo sapiens
aaatttgcaattgtaatgatgggccgacaccagtacataaatgaagacgagtatgaagtaaatttgaaagactttgagccacagcccggtaatatgtctcatcctcggccttggctagggctcgaccacttcaacaaagccccaaagaggagtcgctacacttaccttgaaaaggccattaaaatccataactgatttccaggctggtgtgttcaaggcgaggacggtgtgtgggtggccccttaacagcctagaactttggtgcacgtgccctctagccgaagtcttcagcaagaggattcgctgctggtgttaattttattttattgaggctgttcagtttggcttctctgtatctattgactgccctttttgagcaaaatgaagatgtttttataaagcttggatgccaatgagagttattttatggtaaccacagtgcaaggcaactgtcagcgcaatgggggagaagaggtta

SEQ ID NO: 1198 - DNA, 600 bp, Homo sapiens
ccagccaagaccccttgaatcaagtcaggtgaaatatctccgtcgagaactgatagaacttcgaaataaagtgaatcgtttattggatagcttggaaccacctggagaaccgggaccttccaccaatattcctgaaaatgatactgtggatggtagggaagaaaagtctgcttctgattcttctggaaaacagtctactcaggttatggcagcaagtatgtctgcttttgatcctttaaaaaaccaagatgaaatcaataaaaatgttatgtcagcgtttgacttaacagatgatcaggtttcagggccacccagtgctcctgcagaagatcgttcaggaacacccgacagcattgcttcctcctcctcagcagctcacccaccaggcgttcagccacagcagccaccatatacaggagctcagactcaagcaggtcagattgaaggtcagatgtaccaacagtaccagcaacaggccggctatggtgcacagcagccgcaggctccacctcagcagcctcaacagtatggtattcagtattcagcaagctatagtcagcagactggaccccaacaacctcagcagttccagggatwtgg

SEQ ID NO: 1199 - DNA, 583 bp, Homo sapiens
ctgggccaagtaggagagggaagaggtgatatgagcctcctctgtgctctgacagagaaatgtccaattccagatcaaaggcatcattgccaccctctcctctccttcctcaaagaaaactttctggcctggagggaaatagttaagaactgaaaggccagggggtctggaggaaaaaaaccctctactattcccacaaggcagtgaggggtgataagggtgctagtcacagccctgacagcttcagaaagggtacccacattacctctgggttacccagcatccagagccccaagggacctagctctcccggatatatattcctgcaatggactgacctttttacccacttgtctctggtggtgggagagcactctgaaccagaaaccaacaaggaatccacttcccacccaacttaagagtgtatgcacacatgtggatacacatgcacctccccactactcacacagaccccaacccccttcatgtcttttgaggggggctcaaactactggtgcctggggacacaagcaagacctgggtccatgggaatgtgtgtgtgtgtgcatataagcacatatgc

SEQ ID NO: 1200 - DNA, 527 bp, Homo sapiens; identical to SEQ ID NO: 1189

SEQ ID NO: 1201 - DNA, 528 bp, Homo sapiens
  misc_feature 457: n = A,T,C or G
ccgcaatttactctggcaaacaggactcaaggtcgaagattcataactctcatcgataacttttatgatctcaaggtgcgtataatttgctctgcgtcgactcctatatcaagcttatttttgcatcaacatcatgacagtgagttggagcaaagcagaatactgatggatgatttggggctgagccaggattcagcagaaggactctccatgtttaccggagaagaggaaatctttgcatttcagcgcacaatttcccgactcacggaaatgcagactgaacagtactggaatgaaggagacagaaccaagaacatgctgcccccgcccttgccgccaactctgccgtgagatggacctaataggaaataggaaagaaagcctgacaagcctgcttcacaggaaatctgatttgtccttcactgagctcatcttttgcttctttgagtaaaccctngctttactaactattgtcacaaagtggatcttcggctgtggatgagtgtgacaatagttagtaaagccagg

SEQ ID NO: 1202 - DNA, 485 bp, Homo sapiens
cctctatgatagccttaggctacgaaacatcactattgctaaccatgaaggcacccttgaaccatccatgattgcacagtctggtgttcttggcttcccattaggtaacaactccaagtttcctttggataatacacctgttcgaaatcggggcgatggagatggagattttcagttcagaccattttttgcgggttctcccacagcacctgaacccagcaacagcttttttagttttgtctctccaagtcgtgaattagagcagcagcaagtttctagcagggccttcaaagtaaaaagaatttgagccacgcatagtgtcacgcacctgtgatcccagctacttaggaggttgaggctgggaggatcacttgagcccaggagtctgaggctttagtgatctaagatcatgccactgcactccagcctgggcaacagagtgagaccctgtttctaaaaaaaataaagataatttagctaacttt

SEQ ID NO: 1203 - DNA, 489 bp, Homo sapiens
ccatttagaggaattctaggacagtgggagctgtgttactagcactatataattccagtcagtgctgacaaataacatttaacaagtattgcagtaatcatcacttacaggtaccatttatttcaaaacaacttttttagtctgctccaaagttaaaataaactagctaagcattattattcgactggtctaaaaactattgttatcttttactatgaatactctagaatgatgtaaagcagataggaatgtatgtgtacatatttattgcatacttgcacatcaaatcgatgtacatagtttaacacgtggtccttttgtgaaacctagaactcagaggattgctttttttctttcagcctattttgagtaacttcagtgctttcttagggaaatgacagggcaaagcaatttttctgttggctttgggctgtatttgtgcactaaatctttattctaaaaaaaaaaaatggaaactttaattttttt

SEQ ID NO: 1204 - DNA, 456 bp, Homo sapiens
ccttatttctcttgtcctttcgtacagggaggaatttgaagtagatagaaaccgacctggattactccggtctgaactcagatcacgtaggactttaatcgttgaacaaacgaacctttaatagcggctgcaccatcgggatgtcctgatccaacatcgaggtcgtaaaccctattgttgatatggactctagaataggattgcgctgttatccctagggtaacttgttccgttggtcaagttattggatcaattgagtatagtagttcgctttgactggtgaagtcttagcatgtactgctcggaggttgggttctgctccgaggtcgccccaaccgaaatttttaatgcaggtttggtagtttaggacctgtgggtttgttaggtactgtttgcattaataaattaaagctccatagggtcttctcgtcttgctgtgtcatgcccgcctcttca

SEQ ID NO: 1205 - DNA, 457 bp, Homo sapiens
ctgacaggttacacaatatatatcagacaatgtgacacaaaacatagctctcctctttcgtctcacagaggaactaaagttccaaaatatatacaaaaccatcttccatctccaactgtcttctctttcttcccagttttatgcaaagcagtctcattaatacattcttcaccaggctcaaccaagtagcgtagtgtcttccattgcacctctaaagttggaagattctgatcccacgtcttgacgtgttccaaaaaacaatcaggtcacaaaggtaacagcaaaatacgaggccatgcccaacatttcaaaaacacagcgaagtaacaagaataaacgtgaccacaaaaacaacttaattaagccccatttctcttctgagagtatttctttgacaaaagttatatttccaaaaccaaacacatttgataatctaaatccatatcgaggtcatcaa

SEQ ID NO: 1206 - DNA, 462 bp, Homo sapiens
ctgagctgcagggcctgccggagctgcacgaagagtgtgaggggaaccacccctctgcgaggaaactcacagcccagaggagggcatccacagtttccagtgttactcaggtagaagttgatgaaaacgcttacagatgtggctctggcatgcagatggcagaggacagcaagagcttaaagacacaccagacacagcccggcatccgaagagcgagggacaaagccctttctggtggcaaacggaaagagactttggtgtagagaaggctctgtgtgttaactgatgggagagactgtttgtttataaatgtgtacagttttgttttctcgtaaggggagcatcatagggttactttataccagttgtaacattttcattgtttttggttgttcttttttctttttttaatggcagctaaagatatacagattactgttaaattgcagtcctttttttttt

SEQ ID NO: 1207 - DNA, 582 bp, Homo sapiens
ctgactcatgtgaaaaaggcactatgaaaattaatgaatctagataatttctctaaatgatttatgttaaaatatacaacattcttacataacatctgttttatatatgtgaaataatataacatttaatgacaaaaattgtgtttccaaaaataacatttgttgaaggttaggtatctttcttttctctatgtggaatctttcacaggattaaaatatgtgtaaattaagtgcttcttattaccagaaatacttgacacagataaacacataaaatggccccacttccttttaactactcatatcaacattcagaactgaggctttcattaagcaaaatactgtaatgcacaccaatgcagactacttcctttgctagattttgagaagacatgacctctttcgcatttgtgctttctcatatataagaacacagtatacataataagcagaatataaactaaatcaaaatacaagctatacaaggagttgcaatcaacagagccatgacaaactgtcttgagaatgctccatagatttatatttgcatgtccaaggtatggctgtactttacagttcatt

SEQ ID NO: 1208 - DNA, 550 bp, Homo sapiens
ctggcacaaggaaggagatagtgcccaagtgcaatggctccctaatcaaagtaaactataatcagactgcagtcaaagtgcctacaacacctgccagcccagtgaaaaactggggaggattccggattccaaagaagggggaacggcagcagcagggagaggcccacgatggggcctgccaccagcactcagactacccatatttgggcttaggccgagttccagccaaggaaagggcaaaaagcaaattaaaatccgacaatgagaatgacgggtatgtccccgatgtggaaatgagtgactcagagagtgaggtatcagaaaagaaatgtatacacaccagcagcactatcagcagaaggacagacattatcaggagaagcatcttggcttcttgatgcaacagagatgatgcggaagccctttgggctcgtcattgggtttgctagaggagagctctgatgtgggggagaagcagaaacccattaatcctgagctacacaaacacatttacttgcaattcagattaattttttccagagtcattttt

SEQ ID NO: 1209 - DNA, 525 bp, Homo sapiens
aaaataatcaagtatttactaagtgccaggcacaagcctaggtgctatgaatacctgttggtgttcaggaactacatggtccttggtcctctccctcatgaaacttatactcaagtaggaagtagacaagataatgtgaaatagtaacaaatgctgtgaatctaacacagtaataaaatagaatgtgtctagaactgggttctcttaggtaaggatggtcagaggggttattaaagtaggtgacattttagctgagaccaggagtgataagaaggagccaaattgggtagaaaattgctttctgcaaaagcagtagaaagtacaaagaattttcaggcaagagtgagtaagggtttgtatgagtttggaaacgaattgtttgaagtgaaaagaagtaggcaagatgcatattgcataaggcatagggccatgttaaacaatatttggttacgctggatgtttctgttgcactctgaatggttagccatttcatgaactgaatttcagcaaggtgattgacttttt

SEQ ID NO: 1210 - DNA, 517 bp, Homo sapiens
cagtggctcatgtgtgtaacctcagcactatgggaggttgaggcgggaggactgcctgagcccaggagtttgagaccagcctgggcaacacagtgagacccccatctctaccaaaaaaaaaaaaccttaaaagataataagtatctaattcttttatacttgcatttctctttggatcaaatctcaactttgtgagaggtcatacatttctacagggttaggagtaccctgcataatttatacaaatgtaaagtgtatattaaaaaaaaaaagtgaaagttacctgtaatctaaagggttttcttcccctaraaacagtcaccctctcgtcaagtgtatgacccaattatacctattttatgaaaagcaaggcatcacattgataaccatacaggatcctatgggtttaactggtctaaacttgagtggattaaatcagttgtaattagttagctctgtaggtatatgaaaaacttttggtaatgtacaaaaataggaatgggttttttacctgttt

SEQ ID NO: 1211 - DNA, 166 bp, Homo sapiens
cgctttatctgagtaccatctgttcttggccctgagccggggcccaggtgctcgaccacagatatcctgtttggcccctgtcccagttttgttcagccttattctttaactaaacttccttgtgacttttgagaactcagctctggtactttttcatgcctagcaa

SEQ ID NO: 1212 - DNA, 307 bp, Homo sapiens
aaatgctgcggtttggtcaatggagctgctgattggggaaataattttcaacactatcctgaattatgtgcctgtctagataagcagagaccatgccaaagctataatggaaaacaagtttacaaagagacctgtatttctttcataaaagacttcttggcaaaaaatttgattatagttattggaataccatttggactggcagttattgagatactgggtttggtgttttctatggtcctgtattgccagatcgggaacaaatgaatctgtggatgcatcaacctatcgtcagtcaaaccccttt

SEQ ID NO: 1213 - DNA, 450 bp, Homo sapiens; identical to SEQ ID NO: 719

SEQ ID NO: 1214 - DNA, 485 bp, Homo sapiens
aaagtagaacagtgataagggagggcaggatggtggggatgcagaagcagcagccagagagagacgggctggggtgcagacggagtgtggaaaacgcataccttgaaatgaagcatccagcagatggggtgagtggatacagctcaggagattctcccaggaatagcagggaggcgtaaagagagacaacgtacagagatagatgaatggaaatgggtaagggaggtgttcattcacatccatctaactgcaaaatacaaaagtaagaagtcattgacatgaagcaacgacgaccaagacgttctcagatctaaaggtgaatgatctcagtcagcctggaaatgcacaaggtggaaaaataacataaaaaagccataagaccttgaagaacatcaatgtcaaagataaattctaaagtcccagagaaaaaagaatgggaatcaaattgacctcagactatacgtgagaaacacggagagccagaa

SEQ ID NO: 1215 - DNA, 548 bp, Homo sapiens
  misc_feature 543: n = A,T,C or G
ctggacagcacaattggaatccaccctgtctgtgcagaggtattcacaacattgtctgtgaccaagcgctctggggcaagcatcctccaggctggctgctgaggttaagccccagtgtggatgctgttgccaagactgcaaaccactggctcgtttccgtgcccaaatccaaggcgaagttttctagagggttcttgggctcttggcacctgcgtgtcttgtgcttaccaccgcccaaggcccccttggatctcttggataggagttggtgaatagaaggcaggcagcatcacactggggtcactgacagacttgaagctgacatttggcagggcatcgaagggatgcatccatgaagtcaccagtctcaagcccatgtggtaggcggtgatggaacaactgtcaaatcagttttagcatgacctttccttgtggattttcttattctcgttgtcaagttttctagggttgaatttttttcttttttctccatggtgttaatgatattagagatgaaaaacgttagcagttgatttttgtccnaaagc

SEQ ID NO: 1216 - DNA, 570 bp, Homo sapiens
  misc_feature 545: n = A,T,C or G
gcgtgctgcagggccaggacagaaatagccacacatgccggtgagaacaaagagcccctttctttctcatgttgacatcgactttctgtgccaagtcctttgggtataaggatgctagggaattcctataggcaccaaacagaaggaaagctaggggcttggactactgggtataggacttgctctagctctcaggtcctagcccaagctcaatgcaaacacagcccctccgggctctctgtttctgtgaggttctggaatcccttcctctgtgtccgtgagtctgacagaatcaatgatgttcccttagggctgggaaatccatgtgtttattcacggagggaactcaccattacctcccttgtcttctttgcctgccttggagaaatccagagtcttcggaatggcaaaggcagctcctggatttccctggaggggaggcactagctgagggaagkagctcccttcattcatgatgcacagtttacgcagcagacacacaactgtgcctactatttgctcggtgccctgcaaggtgctgcctnacyttgatttgttatttcagctctc

SEQ ID NO: 1217 - DNA, 440 bp, Homo sapiens
ggggtattgcaggcaacaaggacctttcatacagggcagccacaccttgtccctgtaccacctcttcctgaatacggaggaaaagttcgttatggactgatccctgaggaattcttccagtttctttatcctaaaactggtgtaacaggaccctatgtactcggaactgggcttatcttgtacgctttatccaaagaaatatatgtgattagcgcagagaccttcactgccctatcagtactaggtgtaatggtctatggaattaaaaaatatggtccctttgttgcagactttgctgataaactcaatgagcaaaaacttgcccaactagaagaggcgaagcaggcttccatccaacacatccagaatgcaattgatacggagaagtcacaacaggcactggttcagaagcgccattacctttttgatgtgcaaaggaa

SEQ ID NO: 1218 - DNA, 555 bp, Homo sapiens
ctgtttcataggctggagatgcactcttctagactgctcgagacagccagagacaggggaggagggaagaaggatactgtggaaagggatggcggggcaaacatttagagctagaagccactactgggccaatgctaaagtttctgtctctaagcctaaaaaagccagtgtagtagggcccttatcactcttagtttgctaggtttcccctctgaaataatgagcagatttagccaggctagcagaaaggaagaggacggggctgtgcaggagttagcagaatcttgattcttgctctatggtcggtacttgcacaggaagtgttggcgcttgttgcattcgttgctgctccaagttaaaaagttgttattggagctcatctcagcacagtgcttgttcccacccatggacttgccagaccaggatctgtacagatacatggccccatcaatccactgccactgctgcctcttctgtgggtcgtgcaggccaatccatatcggctggcttctctgatagccacttatgtactctgctatggtgctggcttccttt

SEQ ID NO: 1219 - DNA, 501 bp, Homo sapiens
gcggccgactcgcaagatggcgccgcagaaagactggaagcccaagaggtcaacctggaggtttaatttggaccttactcatccagtagaagatggaatttttgattctggaaattttgagcaatttctacgggagaaggttaaagtcaatggcaaaactggaaatctcgggaatgttgttcacattgaacgcttcaagaataaaatcacagttgtttctgagaaacagttctctaaaaggtatttgaaataccttaccaagaaataccttaagaagaacaatcttcgtgattggcttcgagtggttgcatctgacaaggagacctacgaacttcgttacttccagattagtcaagatgaagatgaatcagagtcggaggactaggcaaaggctccccttacagggctttgcttattaataaaataaatgaagtatacatgagaaataccaagaaattggcttttagtttatcagtgaataaaaaatattatactctcgaa

SEQ ID NO: 1220 - DNA, 549 bp, Homo sapiens
attaactgaaaccaattaataaacatatgaaatatccattgcacaaggcaaaggcacctaaaccttttgtttctttttctacatagcagaaattgattttttttttatttttttaggggaacctatataattatgacccagtgatgtcttttggtgacttaagcttatgaattcaggttacaattgagttgattctagatggttactaccttgaaaaggatgttggtgccttatgtgacacgagccagagcctgctgggaataaacaaagcagattcatgccaacaccaactcgtagctttagtggcagatgggagtggtcacagactcccaaaatgtggggctttggatttccacaccatcccacgtgtgtgtcatcttcctctttcacactcttgatgataatttgaaaatgatgaaatcacctctgaatttgcctatagcatgaacacattcttatgacaacataacaaatagttcataatgtgaatattagaaactgttacagcctgcagttaccataattttccatgttcgtggaattgatatt

SEQ ID NO: 1221 - DNA, 84 bp, Homo sapiens
aaaactatatgagcagtggaagaatttcgatgagagaaaagagatggcaaccattcttagtaagatgccaaaaccaaaaccacc

SEQ ID NO: 1222 - DNA, 556 bp, Homo sapiens
ccaaggggtcggtcacacagaagggaaggcaaggaggaaaactaaactacaatccttggttcagattgagttatgcaggaatatatcttcctgatcagtccccgtgccaaaaaaaaaagccacttggaattatgcactgactccaactatgtgataccagctatcagccttttgtgtttaaccattcccagaaatggacaccacccttggctttataggctccttgcagaacccacttcacaaaaatgctcttcaccaagaagcctctagtttccttttggtaggttataaaaacagaacatctgtcattaacagtagagtgttaaatgcttttaaccactgacaaggcttcagaaagtttcacagtttcgttatgctctattttattactatcatatttacatttttattttttatttattttttgctgaattgctgattttcctttttcaatagaatttaattctggagtgtgagcaggaaccagttaactacattcattgtccaacccccactggtttgaaagaagactccaaattcttggcatatgaatcag

SEQ ID NO: 1223 - DNA, 247 bp, Homo sapiens
ggggcattccctctagattcaggtttgggcaggggtcctatagtccctgccatggggctgcttccctgtcccttccctcccctttgctggcctactctggcataattcaagtgtcttcttgccttggggatccttagtggcatcaaatggcaacatggaatattgtcctccatgcccctccagaaggacctaggagagtaggtgagctttccaaagtgagagacgaatctttctttctttttttttt

SEQ ID NO: 1224 - DNA, 321 bp, Homo sapiens
cgctgtgtttttgaaatgttgggcatggcctcgtattttgctgttacctttgtgacctgattgttttttggaacacgtcaagacgtgggatcagaatcttccaactttagaggtgcaatggaagacactacgctacttggttgagcctggtgaagaatgtattaatgagactgctttgcataaaactgggaagaaagagaagacagttggagatggaagatggttttgtatatattttggaactttagttcctctgtgagacgaaagaggagagctatgttttgtgtcacattgtctgatatatattgtgtaacctgtcag

SEQ ID NO: 1225 - DNA, 525 bp, Homo sapiens
aaaattgggtgtactgactggcctaagcatagactttcttcttttcaatcatatggttacaaaaactgtatattacaaacagtatagaaacaagctgaaaagaatgagccacacatcctggataattatctatatgcagttaaatttacagatataaaagaaaatacagcctactcccttatagtgcacagttattttttagatacagtgtatcactagcaagtggttgcggccaccaactctagttatccccagcacagagaataagagcaagatccgttcggtacagcttccctccatccgacaaagccattatgttcttcttgtatgttgtaatattattaatatccagatcctgtttattcttctcgcacagatccttcagtaaagcatccagttcattttcatctatgtatccattgccgtcctgatcatacagctcaaaagccttattgaactctttcccacacattttgattccctggaatttaagaagaaaattctcctgcactggtagtaacctgg

SEQ ID NO: 1226 - DNA, 185 bp, Homo sapiens
ctgggttaagtatccctttgtagacttcaactcatggcactgctaatttcttgtttatttacttactcttcaattctgaaaaaaagtaggacctttatcttgtttagtattctatccccaagtgcccacacagtgcatcacagaaaacaagatgctccacaaatgtttaatttattaagtgtgcc

SEQ ID NO: 1227 - DNA, 463 bp, Homo sapiens
aaactatgaggacttctagtttagtaaactaaagctgcagggtgccgggggagtggggcagcttcatttgcgactgctctttattctctccagtctttttttcaagtcgtctatgttagctgtggaggaggaggaggtcacagttcctgaagagtgagtctggttagaatccaggtctgaatgctggtgctgctcccgtgactcccggagctgagagagtttgctgtggagcatgtctgtggaagaggcgacagtaggaactgctggtttggagagcaaagaggtcaaaggaggtcggtcatcttgctttgtgttgtccagaccacatcgctgtcggaggatctttagcctttccaagtagacagatggccccacttcttccccatttgtgttacctatggaggacactgtgcttgtgggcgtgggcacacatgtgacttccatctgaggggagatgcctgtt

SEQ ID NO: 1228 - DNA, 518 bp, Homo sapiens
ccagaggaattggggtcttgccatccctgcaatagcccttttatgggctctgggagacagctttagggaataaatggggattttcccctttttctacccactcctttgcttcctccaagacttacccaactccttccccctcagagaaccaaatagcctgaggaagcaggagagttcctggttatggcagtttcttggtgatttggggcttcaagacagtaggtgagagatgctgtcaggacgtatcttcttcataccaaagtcactggtcctttctcagcctctctcgtgcttttctcctaatgaccatatttttgccaaaaattgggatatgttatctgacagaccagaatatttgaagtttgggctgtcctgaaagtctggactttggtggtaccctcctcccccagcccatctgttgcacattatactccatgtgttcttcaactttcggcgcccttattcccctgccttcctggcttgattgaaggaaagcttgaaaaggcgcagagccctgt

SEQ ID NO: 1229 - DNA, 362 bp, Homo sapiens
tttttttttttttttttttgtaaaggtcatggaggccatggggttggcttgaaaccagctttggggggttcgattccttccttttttgtctagattttatgtatacgggttcttcgaatgtgtggtagggtggggggcatccatatagtcactccaggtttatggagggttcttctactattaggacttttcgcttcgaagcgaaggcttctcaaatcatgaaaattattaatattactgctgttagagaaatgaatgagcctacagatgataggatgtttcatgtggtgtwtgcatcggggtagtycgagtwacgtydgggcattccggataggccgawaaagtgttgtgggaagaaagtt

SEQ ID NO: 1230 - DNA, 606 bp, Homo sapiens
gaatgatgggtgcatcatgggcttcatcagcaaggagcgagagcgtgccctgttgaaggaccagcagccggggaccttcctgctgcggttcagtgagagctcccgggaaggggccatcacattcacatgggtggagcggtcccagaacggaggcgaacctgacttccatgcggttgaaccctacacgaagaaagaactttctgctgttactttccctgacatcattcgcaattacaaagtcatggctgctgagaatattcctgagaatcccctgaagtatctgtatccaaatattgacaaagaccatgcctttggaaagtattactccaggccaaaggaagcaccagagccaatggaacttgatggccctaaaggaactggatatatcaagactgagttgatttctgtgtctgaagttcacccttctagacttcagaccacagacaacctgctccccatgtctcctgaggagtttgacgaggtgtctcggatagtgggctctgtagaattcgacagtatgatgaacacagtatagagcatgaatttttttcatcttctctggcgacagttttccttctcatctgtgattccctcctgctactctgt

SEQ ID NO: 1231 - DNA, 577 bp, Homo sapiens
aaagttgtccttattggagattctggtgttggaaagagtaatctcccgtctcgatttactcgaaatgagtttaatctggaaagcaagagcaccattggagtagagtttgcaacaagaagcatccaggttgatggaaaaacaataaaggcacagatatgggacacagcagggcaagagcgatatcgagctataacatcagcatattatcgtggagctgtaggtgccttattggtttatgacattgctaaacatctcacatatgaaaatgtagagcgatggctgaaagaactgagagatcatgctgatagtaacattgttatcatgcttgtgggcaataagagtgatctacgtcatctcagggcagttcctgcagatgaagcaagagcttttgcagaaaagaatggtttgtcattcattgaaacttcggccctagactctacaaatgtagaagctgcttttcagacaattttaacagagatttaccgcattgtttctcagaagcaaatgtcagacagacgcgaaaatgacatgtctccaagcaacaatgtggttcctattcatgttccaccaaccactg

SEQ ID NO: 1232 - DNA, 519 bp, Homo sapiens
tttagtcaaaaggtttaagaagcaaattatttagtagcagaacttatctcaggaaaggaaaatatgcatggttggtgagaatctaataacattaaaatgctggggcaagatgcagtacaaagttgaagagactttattctcaataagttgatttactgatgatatgtcatatgatgcaaaaaaggttttgtgtcattaactgaaaagtagcagcttctctatccaggatgatgagtcaacaggtttcactaatatttgtcatgctgtagcatttgtaagatttgtaaatgatgaaattcaaagaaaactttttctattgctaggagcctgccagaacaaaggccaatatataatgttgtgacatcatatctgataaccagaggtctggtatctacactcctggtgccccatcagtggttgtctccataagtcattttgcgttattaaaaaaaaaaaaaagaaatcctgatgttgacattatagcacactgctttctccacagagatgctgatatcaaaa

SEQ ID NO: 1233 - DNA, 538 bp, Homo sapiens
aaacatggtataatgaattgtgtacttctgtcagaagaaagcagaggtactaatctccaattaaaaaattttttaacatgtaagaattttgtactttgaacaacaagattacagaaagtacctgtggtttttggaaaacatttctagcttggggaatgtgacaacattccccagtgtggtaaaattggggtaaaatgtggtaaaatgtgatacgcacaagccctttgaaaatagcataacaaacatgccctttttctaaaattgataaatcctaaagaggaagaaaagagctgggacaataaaacactggctctggaatctggaatgttaagtccaggccagcagtgacaaaagttattgtaatgacctctgaacagagaaacactgccattgaagaggcttctggtatagaaaacatggtacattcaggagctgtgaatatagctctaggtgtgctcctgaatcagttcatggtagattatgctgaacaacagtgagatgttattggaggtgtggatgagggagtttgttgttgcag

SEQ ID NO: 1234 - DNA, 450 bp, Homo sapiens
aaatactgatacaacatatctggagaacttttcaattgtctgaaatcagattcgagctggaacgagtttgcaggaattggaggaagaacagttgtggcaaactgagcaggtttttgttctatctctatgggcattttctcgctgtaagactgacatacatcctgcttcaaactggcttgaggttgcagggatgaagtatcactgacttcttctattttcaatacttttgctcttggagtatcacttgtgggaaaaaggtcatcttggcttgaattcttcttacttgtggtgcctgtggctgctattacatttgctagattaataggattattctctggagcagcagcagtagtgctatctggcacatcaatagtctgtatcaaattaccagtttcttcaataataaccttcttgagtggtttagttgatccaggatgcggtggattatca

SEQ ID NO: 1235 - DNA, 454 bp, Homo sapiens
  misc_feature 425: n = A,T,C or G
ctggcttcactgctcaggtgattatcctgaaccatccaggccaaataagcgccggctatgcccctgtattggattgccacacggctcacattgcatgcaagtttgctgagctgaaggaaaagattgatcgccgttctggtaaaaagctggaagatggccctaaattcttgaagtctggtgatgctgccattgttgatatggttcctggcaagcccatgtgtgttgagagcttctcagactatccacctttgggtcgctttgctgttcgtgatatgagacagacagttgcggtgggtgtcatcaaagcagtggacaagaaggctgctggagctggcaaggtcaccaagtctgcccagaaagctcagaaggctaaatgaatattatccctaatacctgccaccccactcttaatcagtggtggaagnacggtctcagaactgtttgtttcaattgg

SEQ ID NO: 1236 - DNA, 188 bp, Homo sapiens
ccacagccatgggacagatcatgcctcccctcacactgggcatctggccccagggattgtcctcccttctttctggccttggcctgacaggacctcttgactggactcctgctgtcattctagatttgcagacagcatctacctccagggaagcaaaggattcctcaaaaacttggagtcttcagatt

SEQ ID NO: 1237 - DNA, 525 bp, Homo sapiens
  misc_feature 451: n = A,T,C or G
ctggacttctctatccgaccatgcaatgttagccagcaccaattacccacaatgctttgcccataagagatagaaataatggaactcacaggaagaaacagtattgataacatacacaggcttacagaggccaggcccagtaattaccatgagacagaagcctacaggtggcggtgctttgactgggctgggattattgatacattactgatacatcacttcttttataagcatatgtaaaacgagtgctactgaaagtcgaaggacagcttccggggagtcatgaactctttcactatctcatccgtgacctccttgcgccgggcctggtgctctgcgatcaagggctgcagaacctctatgagtgccttcttgagctcaccggtgagcatggctccgctggtgtaatccttcctgatctgctcgagcttgtcgtcgtcctcgaggaagnaggtcaggtacatgaaagacacgtccacatcacagttgcccccaaactgcctgtgctcctcgatggtgtctctc

SEQ ID NO: 1238 - DNA, 545 bp, Homo sapiens
  misc_feature 514, 526: n = A,T,C or G
ccagatgaacagtgctgtgtcaaagctggtagccagccttatatgtgtgattaggacccatgcataatttggtatgcatctgaacgttcagtgctccaatttaactggaaaagctgtgaaatgcagttgttctgccaaaccacactccactcctttcatcttcctttctagggaaataatttagtttgtcagttatcattgaataactcgagggctgatttgtagattttatccaatgtcataaaagtcaatcttgcctttttcaagccacttcaaataactatggagattattatcaccctgtaaagtatattgttttactcctaagcaagggtgaggaatctgagtatcatgtgcaaggctcaagatgacgcttaggacagaacatgcagagtaaaaatagtttccttccatatccaggtaatagaaagctgacaattgtagtcctgtctttatgggatgaaaacagtccctttacaataagtttcctgaaagggagaacaaatagataatnactcttctggtnacatattatggtacactgg

SEQ ID NO: 1239 - DNA, 569 bp, Homo sapiens
ctggctaaacagatgattgggtacaatctagcgacaaaacaaactccaaaagaaggtgtgaaagttaacaaggtgatggttgctgaagccttggatatttccagagaaacctacctggcaattctgatggaccggtcctgcaatggccccgtgctggtgggcagcccccaggggggcgtcgacattgaagaggtggctgcttcaaacccggagctcatttttaaggagcaaattgacatttttgaaggaataaaggacagccaagctcagcggatggccgaaaatctaggcttcgttgggcctttgaaaagccaggctgcagatcaaattacgaagctgtataatctcttcctgaaaattgatgctactcaggtggaagtgaatccctttggtgaaactccagaaggacaagttgtctgttttgatgccaagataaactttgatgacaacgcagaattccgacaaaaagacatatttgctatggacgacaaatcagagaatgagcccattgaaaatgaagctgccaaatatgatctaaaatacataggactagatgggaacattgcctg

SEQ ID NO: 1240 - DNA, 97 bp, Homo sapiens
ctccgctccttctaggatctccgcctggttcggcccgcctgcctccactcctgcctccaccatgtccatcagggtgacccakaagtcctacaaggtg

SEQ ID NO: 1241 - DNA, 553 bp, Homo sapiens
ccagttgaaaatccgtaccacccaactctggagtggaggggatgctgcggtcctcaactctctgaggcactaaggcccattcatgaggaagaggaaggagagaaggttcttcttcaggaagaagatggaggagcagctcccctcacttctattacactccttttttgatgaccaagtagaagaaaattcagcattgctggggcaagggccgacatcttgggatcacagagatggcagaatcttgttccaggtcttctgaggctttgcgcttaatgggtgaactctgactctgcaacttcaagcttttccaaggttgtacttgtagttagcatttgcaaagtctctccaactagaggtgagaaactggggtcaggaataggcgagccctcactgatttcctccaaaggtggagtctgaggtaaaacatcaggacgaccaaggtgaacgcctggctccacttctgcctttgttgtcacttgtgccttgtgttccccagagaccgatggctggtaagtaatgcaggagttgccactggagcctgctcgccgagaga

SEQ ID NO: 1242 - DNA, 452 bp, Homo sapiens
aaaacttgctttgtttagaattcccacctcatttttccatggacaaaagtattctttatgtcctagtgcacttacaatttggtattacctgggagtgaaaagaaatattacagccatgcctaactgacttcttgaggtaagattgttctgtcagaaaaccctctcccagttcccctgcagctcttcaggaatccacatctctccagagctctttgttctcatgggtggcacctccagagtgaagaagatcctttgtcaagaagggaaacagaggggaaatgagagggtcctgcaggcagagctggaatcaacttccactctgcctcttgcaagctgtgtgaccctgggcacaatttctccttcctctggaaacctctgttttcttagatttggagcagggtggtcacactgaccttgcagagttctgagaatcagagacagaacataaaagg

SEQ ID NO: 1243 - DNA, 472 bp, Homo sapiens
ccaagagttctccactgtgaagactgaaaggacctggtgacatttcggcatcagtcctgttaccacttggaggtaacagaagcaggctcgtgtcctcctttaattctaccacactacatgactcgcaattggttctgaaattagaacgttcaccatcgtacttaaaatcttaggggcatgaagagtcagctagaacaaggaaaaagaaagtcgcaggtagtaggtaagtaggtgggcacatgaaaagccaagctgctctgtccaacaccagtgtacatgtgctttaactaaatgaactccagaggccaacagcagcagacctgctcaattcaccttccaaatcagaacaagaccaaaaagctcaggcttgagttgtcaactatgcataggttccgccagtgatgaggagctcgtaagcaggatctctactccttctgcacaacacgatgcaagcacacagcatgcccagcag

SEQ ID NO: 1244 - DNA, 460 bp, Homo sapiens
cctgacattcctgccttcttatattaataagaaaaataaaacaaaatagtgttgaagtgttggggcggcaaaaatttttgggggtggtatggagagagaatgggcgatgtttctcagggctgcttcaagcgggattaggggcggcgtgggaacctagagtgggagagattaagctgaatggaagatcttgtggtaaggggtgatattgtggggttgttagaagaaacatttgtcgtatagaatgattggtgatggcctggatacggttttgtatgaattgaaaaatggaataagagaaggagagaaacaggtataaaaggtctaagaattgggaggacctaggacatctgattagagtgcctaaggagattcggcatagtcctgccagcaaagattatttatttacttcaagagtttagagtggcagtttggggatagcaccaggagatatcagacctgc

SEQ ID NO: 1245 - DNA, 507 bp, Homo sapiens
cctggaaaagaaccagaaggaggctgggcagaaccagaacaacctgcacttctgccaaggccagggccagcaggacggtaggactctagggaggggtgtggcctgcagctcattcccagccagggcaactgcctgacgttgcacgatttcagcttcattcctctgatagaacaaagcgaaatgcaggtccaccagggagggagacacacaagccttttctgcaggcaggagtttcagaccctatcctgagaatggggtttgaaaggaaggtgagggctgtggcccctggacgggtacaataacacactgtactgatgtcacaactttgcaagctctgccttgggttcagcccatctgggctcaaattccagcctcaccactcacaagctgtgtgacttcaaacaaatgaaatcagtgcccagaacctcggtttcctcatctgtaatgtggggatcataacacctacctcatggagttgtggtgaagatgaaatgaagtcatgtcttt

SEQ ID NO: 1246 - DNA, 492 bp, Homo sapiens
  misc_feature 441: n = A,T,C or G
cctacagacttatttcttcttggacacacccacggtgcggccacggcggccagtggtcttggtgtgctggcctcggacacgaaggccccagaagtgacgcagccctctatgggcccgaatcttcttcagtcgctccaggtcttcacggagcttgttgtccagaccattggctaggacctggctgtattttccatcctttacatccttctgtctgttcaagaaccagtctgggatcttgtactggcgtggattctgcataatggtgatcacacgttccacctcatcctcagtgagttctcccgccctcttggtgaggtcaatgtctgctttcctcaacaccacatgagcatatcttcggcccacacccttaatggcagtgatggcaaaggctattttccgccgcccatcgatgttggtgttgagtactcgcaaaatatgctngaacttttcagggatcactagagacatggctgcagcacaagcggcggcgtg

SEQ ID NO: 1247 - DNA, 250 bp, Homo sapiens
aaactgataagaaacaatgaataggaaagaaaacctgctaaaatctcttagaatttacacgattcttattctactacaagaaagcattatttggtacaaggtgtatttgtggatgtacatgaacagtatatatattatccggatcatgttgtgctatgtacaggtctttacaattcttcctgaaggttaaaacagttcattagaattcaaaatgcgtaatcatctgtaagttggcacttgttaggctctt

SEQ ID NO: 1248 - DNA, 503 bp, Homo sapiens
ctgctcccgagacgagccctcagtggctgccatggtctaccctttcactggggaccacaagcagaagttttactgggggcacaaagagatcctgatccctgtcttcaagaacatggctgatgccatgaggaagcacccggaggtagatgtgctcatcaactttgcctctctccgctctgcctatgacagcaccatggagaccatgaactatgcccagatccggaccatcgccatcataactgaaggcatccctgaggccctcacgagaaagctgatcaagaaggcggaccagaagggagtgaccatcatcggacctgccactgttggaggcatcaagcctgggtgctttaagattggcaacacaggtgggatgctggacaacatcctggcctccaaactgtaccgcccaggcagcgtggcctatgtctcacgttccggaggcatgtccaacgagctcaacaatatcatctctcggaccacggatggcgtctatgagggcgtgg

SEQ ID NO: 1249 - DNA, 463 bp, Homo sapiens
aaaatatatatgttgatttcttgtaacatccaataggaatgctaacagttcacttgcagtggaagatacttggaccgagtagaggcatttaggaacttgggggctattccataattccatatgctgtttcagagtcccgcaggtaccccagctctgcttgccgaaactggaagttatttattttttaataacccttgaaagccatgaacacatcagctagcaaaagaagtaacaagagtgattcttgctgctattactgctaaaaaaaaaaaaaatcaagacttggaacgcccttttactaaacttgacaaagtttcagtaaattcttaccgtcaaactgacggattattatttataaatcaagtttgatgaggtgatcactgtctacagtggttcaacttttaagttaagggaaaaacttttactttgtagataatataaaataaaaacttaaaaaaaattt

SEQ ID NO: 1250 - DNA, 50 bp, Homo sapiens
ccattgcagtagtagatccatttctcccggttcytgggttggagtcatgg

SEQ ID NO: 1251 - DNA, 519 bp, Homo sapiens
aaagtcataatactttgtccagtagatgcagagttgctggtagtttatgactaattccaagaccgtccgaaatccctgggctgtgttgaaatgtgttttcatgctccctcgctcccaagcatagaccgtcaggagctccagggcatactgaggtggcagcttcccaagcttcttcttacaattttggtaccagtgcttgactaggcggatgaggctcttgagcttggtggggcgctgcttcaggaagtctctctgtagttctgtgaagcaggtggagaactcgccctctttctgcaggtcggtgcactcctcgatgagcttgacatagatttgggggttaggtttatagccgccagtcaactgacccagggcatcaaaggcaggcagcacatcgaactccaccccctccccgagctggagcgaactcagtacgaagctgagcgcacgggggttgccccagcgtggagcctggacctcaaacttcacggaaaatgctctctctctttgacaggcttccag

SEQ ID NO: 1252 - DNA, 544 bp, Homo sapiens
  misc_feature 484: n = A,T,C or G
cctgctgggcttggcaacgagggactcggcctcggaggcgacccagaccacacagacactgggtcaaggagtaagcagaggataaacaactggaaggagagcaagcacaaagtcatcatggcttcagcgtctgctcgtggaaaccaagataaagatgcccattttccaccaccaagcaagcagagcctgttgttttgtccaaaatcaaaactgcacatccacagagcagagatctcaaagattatgcgagaatgtcaggaagaaagtttctggaagagagctctgcctttttctcttgtaagcatgcttgtcacccagggactagtctaccaaggttatttggcagctaattctagatttggatcattgcccaaagttgcacttgctggtctcttgggatttggccttggaaaggtatcatacataggagtatgccagagtaaattccatttttttgaagatcagctccgtggggctggttttngtccacagcataacaggcactgcctccttacctgtgaggaatgcaaaataaagcatggat

SEQ ID NO: 1253 - DNA, 464 bp, Homo sapiens
ccaaggcagtagccactgagtgcagccttaccttcctcagcgtgaaggggccagagctcattaacatgtatgtgggccaaagtgaggagaatgtgcgggaagtgtttgccagggccagggctgcagctccatgcattatcttctttgatgaactggactctttggccccaagccgggggcgaagtggagattctggaggagtgatggacagggtggtgtctcagctccttgccgagctagatgggctgcacagcactcaggatgtgtttgtgattggagccaccaacagaccagatctcctggaccctgcccttctgcggcctggcagatttgacaagctggtgtttgtgggggcaaatgaggaccgggcctcccagctacgcgttctaagtgccatcacacgcaaattcaagctagagccatctgtgagcctggtaaacgtgctagattgctgccctccccag

SEQ ID NO: 1254 - DNA, 478 bp, Homo sapiens; identical to SEQ ID NO: 984

SEQ ID NO: 1255 - DNA, 522 bp, Homo sapiens
aaacctgcaaacaatataaagaggtaaggacttctgacgccaaaccatgcaagtaataacaaaggaacagagaaaaatattaataacaaaaagaaaatcattaaaaataaaaaaacaaagtacttcacatttcacagcagtgctttggcagtactggcaagcatttctggtcaactgcttccaacagcaggaatatgaagaaacccccagatcttagcaaaagtgtaacaacattttctccctgacagcttacattccaagtcattccataccataccgctccactccacagttttatacacctgatcttaagatgtaactaggtactatgtgtgctcacaataaaaactaactaaaaacaaatcagagggtagcagacaagtaaacaaagtttccagtaaggcatcaggagatcactgctggtgggcccctcactttaccagcttaaagaagttttgatttttatttctcagcaaactcaatattcagaagctttaccagcagactcaagtcaaaggtttt

SEQ ID NO: 1256 - DNA, 494 bp, Homo sapiens
ctgtctcttacttttaaccagtgaaattgacctgcccgtgaagaggcgggcatgacacagcaagacgagaagaccctatggagctttaatttattaatgcaaacagtacctaacaaacccacaggtcctaaactaccaaacctgcattaaaaatttcggttggggcgacctcggagcagaacccaacctccgagcagtacatgctaagacttcaccagtcaaagcgaactactatactcaattgatccaataacttgaccaacggaacaagttaccctagggataacagcgcaatcctattctagagtccatatcaacaatagggtttacgacctcgatgttggatcaggacatcccgatggtgcagccgctattaaaggttcgtttgttcaacgattaaagtcctacgtgatctgagttcagaccggagtaatccaggtcggtttctatctacttcgaattcctccctgtacgaaaggacaagagaaataagg

SEQ ID NO: 1257 - DNA, 483 bp, Homo sapiens
aaaaagcaatcctcaaactctctagccacagcagtaattaagattaaggtctgtcagtgggctgatcccctccaggtagcctccctcactccaagagaagatgtagagaaatatggatgacacatgcttgcattgtttttgtgtcaaaacacacacacacccacacacacacataatataaggcagcccaaaggtctgtggcagaaaacactgcaaatgactcagtgatacactacatttgcaatctctcatttatacaaaaaaagaaacaagtttccagtttgttttcaacaaaaacaacaaagaaaaaagggatggacaaaaaggcatttatacaaatctagggtgaggaatacaaagaaacttgcttttaataataaaaaaagattaaagagataaataaaaaaaaactggttacagttaagaacataatttaacaacagatgaccataccctttgaggaaagctccaacaacctatttt

SEQ ID NO: 1258 - DNA, 459 bp, Homo sapiens
ctgccccccacccttcccttcgatgacaacgtttgcaggcttcagggggaccagggaacaaagctggggcctggcagccccactacgctgccagccggggagaacaagtcacaattacaaattatcacaacaattagcgcctgtacttgggggatctgcaaattgaggaggccccagctcctcattgtacacgggtctatttggcagtgaccttgctctggagacgatgatattccttcagcctgagggaattgatgttgatgaacccggtggcatcagttggctcataatcaccctgcacgttcatgctcaccagctcctcattgtagagagacagtggggactcccggccgaggatgtacacctggcccttgaggacggacacctgcactttcccttccactcgctcctgggacttggcgatgcagtggcggacaaattcacactcagggctgtgcc

SEQ ID NO: 1259 - DNA, 425 bp, Homo sapiens
aaataaggcttggggtttttcccggtcttttggggaacttgaaactgaggtgggactttccagaaactgttgctagtttcgctttatctgagtaccatctgttcttggccctgagccggggcccaggtgctcgaccacagatatcctgtttggcccctgtcccagttttgttcagccttattctttaactaaactttcttgtgacttttgagaactcagctctggtactttttcatgccttgcaaaatggcgttactgcagctagcttgctaagccttatggtggggtctttcattcccccctctttctggaaactgaataaaatcttttattcacgcgattctacttcttctggatctattgatttgagttggtgatactgttgggtcagaaccagggcctgcaccaccgaaattctgtctttt

SEQ ID NO: 1260 - DNA, 534 bp, Homo sapiens
aaaaactgcattactgaatttaacaaaagtcagacactagaatcatatatttgctgcataaaagttgatttgatacctggtggtgattgaatttagtctcaaagactcataaataaaaatctgacttaagacgtagtcataccagtataccaattctcccatcactttgactttcggcagagagattagagcaaaaaatattcaggagaacagtggagttacattgtattatgtatgtttaatataatatcaattttaaggttaaggttaaggaaatcttaattttaaggttaaaccttgagtactagttatagaacttaatattcctggttaaagagtaagttaactgggttattatgtggccttggttgaagaccataaattatgcatttatgcatttgtggttgctttggttctcaatacattgaatatgcatagccccttctagaaatatatatagtgagaaatctgtaaaatgggggagttagactaagtgtgaactaaaatcttcccactgtgtacaggacacatcag

SEQ ID NO: 1261 - DNA, 254 bp, Homo sapiens
aaaagaaaaagatatacttgttttgccccttgacctgaccgacactggttcccatgaagcggctaccaaagctgttctccaggagtttggtagaatcgacattctggtcaacaatggtggaatgtcccagcgttctctgtgcatggataccagcttggatgtctacagaaagctaatagagcttaactacttagggacggtgtccttgacaaaatgtgtwctgcctcacatgatcgagaggaagcaaggaaaga

SEQ ID NO: 1262 - DNA, 511 bp, Homo sapiens
ccaaaaagcacctggagatcaaccctgaccaccccattgtggagacgctgcggcagaaggctgaggccgacaagaatgataaggcagttaaggacctggtggtgctgctgtttgaaaccgccctgctatcttctggcttttcccttgaggatccccagacccactccaaccgcatctatcgcatgatcaagctaggtctaggtattgatgaagatgaagtggcagcagaggaacccaatgctgcagttcctgatgagatcccccctctcgagggcgatgaggatgcgtctcgcatggaagaagtcgattaggttaggagttcatagttggaaaacttgtgcccttgtatagtgtccccatgggctcccactgcagcctcgagtgcccctgtcccacctggctccccctgctggtgtctagtgtttttttccctctcctgtccttgtgttgaaggcagtaaactaagggtgtcaagccccattccctctctactcttgacagcaggattgga

SEQ ID NO: 1263 - DNA, 559 bp, Homo sapiens
ctgcaagcgttaatttagttagagtcttcttgatggttttatttattttttttacctgacctgaactctggggtctataagcacaatgtaatttctaatcgatccccagtaaatcggccaccgactgacttacctgggagacgaaggcaggcccattatcggaacccaatacctgtggcatcccgaatcttgggaatatttcttttaatagcttcttggtcacaaccttggcagtttcacgtttagttgggaaggctttcacccagctagagaaggtgtctacgaacaccaggaggtacttgtacccgtacagccctggtttaacttcagtgaagttaattttccaatgggtacctggtcgatgtccgcgtactcgtacccctgccccgattttggctttactagcatttacttgagcacagactgtgcaggattctgccacatactgaagagttctgtccctgtttaacatgtagtaggggcttttttctctgtcaaggagcgcctttattttttgagggctgagatgggtgagtctatgaagggagtttaataattt

SEQ ID NO: 1264 - DNA, 471 bp, Homo sapiens
aaaaattgttgaatgaaactgacaaggtatggaaaacgtgtcaacattatttactaagaatattttagatgaagttctgcctaatctatttgccatcaaactctataaatgctgctctagtaggtcctattcaatctgtatttgtaaattaactaggtcagaccacagctagtgaacaatttcagcaccaataagttattgaaaatggaattttataccattaagaaacaaaatggctggatattcaaatgtcaaggtgaaggtataatttgaagacaccaaatttctggaaaaaaaaacctttttaataatatcttcacattagctttacaatagtagttgtactccgcttaaaatcgtatgcagtctgggcatatcaaatatatgatgattttttttaagaagtgaaattggagccctagtcccaactcgggggagtactatgaagaaatgattcaacactgcacattt

SEQ ID NO: 1265 - DNA, 624 bp, Homo sapiens
ccagctttggtctgtctgctagagacttagatgaactgagtcgttatccagaggacaagattactcctgagaatttgccccaaatccttctacagcttaaaaggaggagaactgaagaaggccctaccttgagttatggtagagatggcagatctgctacacgggagccaccatacagagtacctagggatgattgggaagaaaaaaggcactttagaagagatagttttgatgatcgtggtcctagtctcaacccagtgcttgattatgaccatggaagtcgttctcaagaatctggttattatgacagaatggattatgaagatgacagattaagagatggagaaaggtgtagggatgattctttttttggtgagacctcgcataactatcataaatttgacagtgagtatgagagaatgggacgtggtcctggccccttacaagagagatctctctttgagaaaaagagaggcgctcctccaagtagcaatattgaagacttccatggactcttaccgaagggttatccccatctgtgctctatatgtgatttgccagttcattctaataaggagtggagtcaacatatcaatggagcaagtcacagtcgtcgatgccagc

SEQ ID NO: 1266 - DNA, 518 bp, Homo sapiens
ctgatccttatggatgtgaatgacaaccctcccaggctagccaaggactacacgggcttgttcttctgccatcccctcagtgcacctggaagtctcattttcgaggctactgatgatgatcagcacttatttcggggtccccattttacattttccctcggcagtggaagcttacaaaacgactgggaagtttccaaaatcaatggtactcatgcccgactgtctaccaggcacacagagtttgaggagagggagtatgtcgtcttgatccgcatcaatgatgggggtcggccacccttggaaggcattgtttctttaccagttacattctgcagttgtgtggaaggaagttgtttccggccagcaggtcaccagactgggatacccactgtgggcatggcagttggtatactgctgaccacccttctggtgattggtataattttagcagttgtgtttatccgcataaagaaggataaaggcaaagataatgttgaaagtgctcaagcatctgaagt

SEQ ID NO: 1267 - DNA, 560 bp, Homo sapiens
aaacaagaacttgctaaagaaacctcatcacaacaacgttttagggcctgatcactttaagtccatggggccattaatgaatatcaaccaaatgtctctttataatctgcaagccgtttttcctacaacaagaaggcgtaacatgtttccttgactcaggtgataacattagaaaagaaatcatgatttgtttcttttgctgtaacaggcagacactgcatttcttgctataatcaggaaagatggaacgactgctgcccttctcttgctgctatcaacagtttttcacgcattatctcaatgcttgaatagtccggcaacttaagatagttcacacaagtcattacagagggcaagaagtcatctgggttttctgttgattcaaacgtctttcggacaattgtcaaaggtggattcaaactccggaatcctccaacaggcaatcttgggctaccagtcacaaactggagaaataacctctgctgctcattatcaaaactactgagaatctcaaacaaaaacttcacagcccgactgtcatgagtataaccatgatcagg

SEQ ID NO: 1268 - DNA, 520 bp, Homo sapiens
ggactacatgcgggatctttaccggcttcagtctggggaggaggaggaagagcagatccacagcactggtcttgagtatcctgagcgcccggccagccgggccaacaccgtgaggagcttccaccacgaagaacatctggagaacatcccagggaccagtgaaaactctgcttttcgcttcctctttaacctcagcagcatccctgagaacgaggcgatctcctctgcagagcttcggctcttccgggagcaggtggaccagggccctgattgggaaaggggcttccaccgtataaacatttatgaggttatgaagcccccagcagaagtggtgcctgggcacctcatcacacgactactggacacgagactggtccaccacaatgtgacacggtgggaaacttttgatgtgagccctgcggtccttcgctggacccgggagaagcagccaaactatgggctagccattgaggtgactcacctccatcagactcggacccaccagggccagcatgtcagg

SEQ ID NO: 1269 - DNA, 404 bp, Homo sapiens
aaataaggcttggggtttttcccggtcttttggggaacttgaaactgaggtgggactttccagaaactgttgctagtttcgctttatctgagtaccatctgttcttggccctgagccggggcccaggtgctcgaccacagatatcctgtttggcccctgtcccagttttgttcagccttattctttaactaaacttctttgtgacttttgagaactcagctctggtactttttcatgccttgcaaaatggcgttactgcagctagcttgctaagccttatggtggggtctttcattcccccctctttctggaaactgaataaaatcttttattcacgcgattctacttcttctggatctattgatttgagttggtgatactgttgggtcagaaccagggcctgc

SEQ ID NO: 1270 - DNA, 550 bp, Homo sapiens
ccatctgatctataaatgcggtggcatcgacaaaagaaccattgaaaaatttgagaaggaggctgctgagatgggaaagggctccttcaagtatgcctgggtcttggataaactgaaagctgagcgtgaacgtggtatcaccattgatatctccttgtggaaatttgagaccagcaagtactatgtgactatcattgatgccccaggacacagagactttatcaaaaacatgattacagggacatctcaggctgactgtgctgtcctgattgttgctgctggtgttggtgaatttgaagctggtatctccaagaatgggcagacccgagagcatgcccttctggcttacacactgggtgtgaaacaactaattgtcggtgttaacaaaatggattccactgagccaccctacagccagaagagatatgaggaaattgttaaggaagtcagcacttacattaagaaaattggctacaaccccgacacagtagcatttgtgccaatttctggttggaatggtgacaacatgctggagccaagtgctaacatg

SEQ ID NO: 1271 - DNA, 487 bp, Homo sapiens
cctacagacttatttcttcttggacacacccacggtgcggccacggcggccagtggtcttggtgtgctggcctcggacacgaaggccccagaagtgacgcagccctctatgggcccgaatcttcttcagtcgctccaggtcttcacggagcttgttgtccagaccattggctaggacctggctgtattttccatcctttacatccttctgtctgttcaagaaccagtctgggatcttgtactggcgtggattctgcataatggtgatcacacgttccacctcatcctcagtgagttctcccgccctcttggtgaggtcaatgtctgctttcctcaacaccacatgagcatatcttcggcccacacccttaatggcagtgatggcaaaggctattttccgccgcccatcgatgttggtgttgagtactcgcaaaatatgctggaacttttcagggatcactagagacatggctgcagcacaagcggcg

SEQ ID NO: 1272 - DNA, 522 bp, Homo sapiens
  misc_feature 475: n = A,T,C or G
aaaagaggaaatgattctgagatgtgctcattttattttaatttggtggttggtggttttccaagtagtctgtaaaatcctgcaagattcacagtctctggtgtgaaacctcagaagtgagtcgttgtgagcctgtgggcagcaccaccaaggcaggctaaggggagggtgcagtaagtggagtttgtgaggctgagtggctgaggagggagcaagtgcaacaaaatagggctagagaagaaccagccaaggagtggaacccatgctgctctcagagattcacggaacacggcagccttctgcaggcagttccatgcatgtgcactcacgctgcaatcacagatgtcccagtaattaacctttctaagtcttgtgaatgctgactgcactttcacctcctcgaaaagccattggaagtttttagagcagcagcagccacagtttgtaagacaaatgtagagggggacgcaaaagnaaaagacaccaccaggaggaggattcagtgtgcagtcagcacagacc

SEQ ID NO: 1273 - DNA, 494 bp, Homo sapiens; identical to SEQ ID NO: 424

SEQ ID NO: 1274 - DNA, 532 bp, Homo sapiens
cattgatgactcgctcattggtggaaatgcctccgctgaaggccccgagggcgaaggtaccgaaagcacagtaatcactggtgtcgatattgtcatgaaccatcacctgcaggaaacaagtttcacaaaagaagcctacaagaagtacatcaaagattacatgaaatcaatcaaagggaaacttgaagaacagagaccagaaagagtaaaaccttttatgacaggggctgcagaacaaatcaagcacatccttgctaatttcaaaaactaccagttctttattggtgaaaacatgaatccagatggcatggttgctctattggactaccgtgaggatggtgtgaccccatatatgattttctttaaggatggtttagaaatggaaaaatgttaacaaatgtggcaattattttggatctatcacctgtcatcataactggcttctgcttgtcatccacacaacaccaggacttaagacaaatgggactgatgtcatcttgagctcttcatttattttgactgtgatttattt

SEQ ID NO: 1275 - DNA, 602 bp, Homo sapiens
gagaaatcgcttggacttcggggcggcctcggacggccatggcctttaccctgtactcactgctgcaggcagccctgctctgcgtcaacgccatcgcagtgctgcacgaggagcgattcctcaagaacattggctggggaacagaccagggaattggtggatttggagaagagccgggaattaaatcacagctaatgaaccttattcgatctgtaagaaccgtgatgagagtgccattgataatagtaaactcaattgcaattgtgttacttttattatttggatgaatatcagtggagaaaatggagactcagaagaggacatgccagtagaagttattactttggtcattattggaatatttatatcttagctggctgaccttgcacttgtcaaaaatgtaaagctgaaaataaaaccagggtttctatttatctgttkktttttaatgttgcacttgtagtttcattacaaaagatcagatcatgaaaggcagtaactctccaggactggaatatctgattgctcagtgttaatagtagttcatgctgtggtgagattgttaaaagggtgcaagactgttgcttctctttttttarata

SEQ ID NO: 1276 - DNA, 597 bp, Homo sapiens
aaaaactatgttaacagagcagttatagaacagaacttcttatatttctttatttacaccacactctgaaaaaaaaacccagttctatttgattaactatgaatagcaaagttttgtgacttgtgactcacttaaatcacccatctgaaattcatttacaaggtttttacattaataaaacagtagtgtggtacatgtattggactcagatgaagtctaaagtacactggactctagagagtggattacataccaacgaccaagattcaagtgtttggggaaaaaaataccttagacagtctatgttggcgtcaacactaaaataaaaggcaaacatgcaggactttcaaagcttgattagataatggttctttgttttctttccttcaaatttgtgctcataattaatattcaggttccctctccccgctttcatagatcccaaagtttgagaaatgcagcaattcaattgtgaaaaaaacattcttctccccagcttctgttttcatatgtactgtgtagtggtatcagtgttaaaaatggaagatcattatgaagaaacaatttgtcatttgggtatatctgtttctataggac

SEQ ID NO: 1277 - DNA, 549 bp, Homo sapiens
ccaacatggtgaaacccgtctttattaaatatacaattattagctctctattaaaaatacaaaaattagctgggcatggtggtgggtgcctgtaatcccagctacttgggaggctgaggcaggaaaattgcctgaacccaggaggcggaggttgcagtgagccaagattgtgccattgcactccagcctgggaaacaagactaaaactctgtctcaaaaaaaaaaaaaaaaaagaattagagtataaaaagttttctgctgaatatctgttctgttcttactgtggttatgctatgccacatataacctgtacaactattttgtcctgtttatctatttgtggaaataagtcggctcaataaaatgtgaaatatacattagtttgctttagatgcaaagattagctgtttttggcttaactgtatcataaccaaaaaagtctataccttgataatacaatatgaaaaagttcacatatgtacatgggtacattccttcattaaagtttttccttaattctatctcaatgtatctttacaactgatacaa

SEQ ID NO: 1278 - DNA, 434 bp, Homo sapiens
caagacgagaagaccctatggagctttaatttattaatgcaaacagtacctaacaaacccacaggtcctaaactaccaaacctgcattaaaaatttcggttggggcgacctcggagcagaacccaacctccgagcagtacatgctaagacttcaccagtcaaagcgaactactatactcaattgatccaataacttgaccaacggaacaagttaccctagggataacagcgcaatcctattctagagtccatatcaacaatagggtttacgacctcgatgttggatcaggacatcccgatggtgcagccgctattaaaggttcgtttgttcaacgattaaagtcctacgtgatctgagttcagaccggagtaatccaggtcggtttctatctacttcaaattcctccctgtacgaaaggacaagagaaataagg

SEQ ID NO: 1279 - DNA, 530 bp, Homo sapiens
aaattttagaaaacctgtataaattactggtgcataacttaaagattattctgcctttggctaattgagtaattcccctccagtactagagaccgctcagtgctcttactagatgaactcagtaacgccttgagctgggttgattgaggatgtgtgaaaagctcacagagcccgatgcctgctgctatttcacggcaatgagcctttttctttctacactgaagattttcttcttatttaatgtggtttattttgggctcagaaataattgctctgttgaaaataatcctttgtcagaaaagaaggtagctaccacatcattttgaaaggaccatgagcaactataagcaaagccataagaagtggtttgatcgatatattaggggtagctcttgattttgttaacattaagataaggtgactttttccccctgcttttaggattaaaatcaaagatacttctatatttttatcactatagatcatagttattatacaatgtagtgagtcctgcatgggtactcgatgtg

SEQ ID NO: 1280 - DNA, 570 bp, Homo sapiens
tcgtgaagggccccagaggaaccctgcggagggacttcaatcacatcaatgtagaactcagccttcttggaaagaaaaaaaagaggctccgggttgacaaatggtggggtaacagaaaggaactggctaccgttcggactatttgtagtcatgtacagaacatgatcaagggtgttacactgggcttccgttacaagatgaggtctgtgtatgctcacttccccatcaacgttgttatccaggagaatgggtctcttgttgaaatccgaaatttcttgggtgaaaaatatatccgcagggttcggatgagaccaggtgttgcttgttcagtatctcaagcccagaaagatgaattaatccttgaaggaaatgacattgagcttgtttcaaattcagcggctttgattcagcaagccacaacagttaaaaacaaggatatcaggaaatttttggatggtatctatgtctctgaaaaaggaactgttcagcaggctgatgaataagatctaagagttacctggctacagaaagaagatgccagatgacacttaagacctacttgtgatattt

SEQ ID NO: 1281 - DNA, 457 bp, Homo sapiens
ctgcactggtctgaagatataactaagtccctggactttttctcccttaattggagaattcctaatgttccatgatcagcctgattgaccagtggctgactggtcctgagaggggagataaaaacagacacacagctttctccatagacaaatctcaacactttattcatcctgtggcagcaagaaggggacatggccccaagatagccaatcaggtgaggtggctggagtatgtgttatctttccagatagtacatacagactgatcatgcagaaacaggaagggaagcaataagttaaaagccacataagttatgaaaaaataatatatactttatatgtcttgtatccccactgaggatttgctcccttggaaaccaatgaagagcctgaggaaaagcaccaatcagcaccctcttttgggactttggggatgagaatctctgagttcccatgg

SEQ ID NO: 1282 - DNA, 522 bp, Homo sapiens
aaagttataaaatttccagaaataaaaaaagtcttgtctacaggggttaaaagagcatcttatccaggaacctctagagcagggatgtgcaatcttttggctttcctgggccacactggaagaagaagaattgtcttgagccacacataaaatatactaacactaatgatagctgatgagccaaaaacaaaaaattgcaaaaaacaaaacaaaacaaaacaaaaaactcataatgttttaagaaagtttacaaatttatgttgaaaagatatctgtactcccatgcttcactgcagcactattcgcaatagccaagatacaaaatcaacttaaaagtccaccaaggaataaacggctaaggaaaatgtggcacacacacaatggaatactattcagccatgaaaaagaaggaaatcctattgtttgtgataacatagaagaagctggagaaagttatgtaaagtgaaataagtcaagcacagaaaaacaaatacctcatgatctcactcatatgtggaatct

SEQ ID NO: 1283 - DNA, 407 bp, Homo sapiens
ccaaccaggggcagggcgtacttcagcacgaagtccttgatggccgagtcctgggtggagccctggacgtccatcatgtggctccggggctcatacttggactggaatttctcaggctgcattacaaccaactgcccctgggagactttcaagaactttgctatttctgtgctgaaagtgtggtgaaatttgtaatcttctctcaggttgttagcggcatcctggtattgctggtaggctgggtcactctcccccttaaagaccccgatgatgatgacatcgtctccatccttcaggaactcctggacctgcttcagggtcagaatctccttggagggaggcccggactgctcgatcatgtaatcaacgattccatatttttctcgtgggccgttgtagtcataagg

SEQ ID NO: 1284 - DNA, 445 bp, Homo sapiens
aaatcccaacaagggtggtttgaagggctgtttaataagtccccttggttcaccaccctgatatccaccatcatgggtcccctgataatcctcttgttaattttactctttgggccttgtattctcaatcgcctggtccagtttatcaaagacaggatttcggtagtgcaggccctggttctgacccaacagtatcaccaactcaaatcaatagatccagaagaagtagaatcgcgtgaataaaagattttattcagtttccagaaagaggggggaatgaaagaccccaccataaggcttagcaagctagctgcagtaacgccattttgcaaggcatgaaaaagtaccagagctgagttctcaaaagtcacaaggaagtttagttaaagaataaggctgaacaaaactgggacaggggccaaacaggatatctgtggtcgagcac

SEQ ID NO: 1285 - DNA, 450 bp, Homo sapiens
ccacagaagtaggggggtcttccttgagctctgtgtcagagttccacctgatccttatggatgtgaatgacaaccctcccaggctagccaaggactacacgggcttgttcttctgccatcccctcagtgcacctggaagtctcattttcgaggctactgatgatgatcagcacttatttcggggtccccattttacattttccctcggcagtggaagcttacaaaacgactgggaagtttccaaaatcaatggtactcatgcccgactgtctaccaggcacacagagtttgaggagagggagtatgtcgtcttgatccgcatcaatgatgggggtcggccacccttggaaggcattgtttctttaccagttacattctgcagttgtgtggaaggaagttgtttccggccagcaggtcaccagactgggatacccactgtgggcatggcag

SEQ ID NO: 1286 - DNA, 527 bp, Homo sapiens
ggaaacttcagtggtcgtggtggctttggtggcagccgtggtggtggtggatatggtggcagtggggatggctataatggatttggtaatgatggaagcaattttggaggtggtggaagctacaatgattttgggaattacaacaatcagtcttcaaattttggacccatgaagggaggaaattttggaggcagaagctctggcccctatggcggtggaggccaatactttgcaaaaccacgaaaccaaggtggctatggcggttccagcagcagcagtagctatggcagtggcagaagattttaattaggaaacaaagcttagcaggagaggagagccagagaagtgacagggaagctacaggttacaacagatttgtgaactcagccaagcacagtggtggcagggcctagctgctacaaagaagacatgttttagacaaatactcatgtgtatgggcaaaaaactcgaggactgtatttgtgactaattgtataacaggttattttagtttctgttctgtggaa

SEQ ID NO: 1287 - DNA, 563 bp, Homo sapiens
gtggccgttacggccgaaaagatggcggtcttggcacctctaattgctctcgtgtattcggtgccgcgactttcacgatggctcgcccaaccttactaccttctgtcggccctgctctctgctgccttcctactcgtgaggaaactgccgccgctctgccacggtctgcccacccaacgcgaagacggtaacccgtgtgactttgactggagagaagtggagatcctgatgtttctcagtgccattgtgatgatgaagaaccgcagatccagtaagtttagttcacttctcagactcaaggttagatctaatgccctttggaggtgctttgcttcatgttaagagagtggcaatcatttggtaaatttgtcctacgtttaattccaaggctgaatttgaacttggacttctatcccctccctgtctcctatttcaaagtgccccatgaagagggacaaagaatgggatataggagtgcacagcccagcctgacctgtgacatctctgtgtttcagtcactgtggagcaacatataggcaacattttcatgtttagtaaagtgg

SEQ ID NO: 1288 - DNA, 578 bp, Homo sapiens
aaaggaaggaacaatagctaggtaagatttttatcagctttctctgtctgaatccagtttttcctctgtcagtcctggaagcttgaatagaactatattgttgaagccttcaggtcacaaactgtcttttgtaacctcctgtccctcctaaaacacgccaacccctgcagtcaaatcacattagtaatctgatttgctgacagtcctgccctgcctgctcctcgttttcccacatgtcctgcatccctcccccactggagtgatttcagtgaatcagacaaggaaggatgtgtaggatcactactgcattgcaataccctgttatcctcagcaacaaaacccacatttcatacatcctttgtgtactcaggataaagactgatgtttactctctgggcactgttgtaagatagcttttgtcagagcataatcattgtctgcaaagtgtttggtgcgaggaagattattgctaattttgtgaaataaagagtctagccctctccttttaatgaacttaactctcgctggcatctgtagtatcattgggagcttaggcgcacatggaaatgagagcccga

SEQ ID NO: 1289 - DNA, 636 bp, Homo sapiens
  misc_feature 628: n = A,T,C or G
ccatgcgcagtcatgagtcgcttcaagtttatcgatattggtatcaacttgactgaccctatgttcagaggaatttataggggggttcaaaagcatcaagatgacttacaggatgtaatagggagagctgtcgagattggtgttaaaaagtttatgattacaggtggaaatctacaagacagtaaagatgcactgcatttggcacaaacaaatggtatcctcatatttcttttaccaaaaaaaatgaattaagtaattttgaagaagtctttctgaaaactgcttcaggtatgtttttcagtacagttggatgtcatcctacaagatgtggtgaatttgaaaagaataaccctgatctttacttaaaggagttgctaaatcttgctgaaaacaataaagggaaagttgtggcaataggagaatgtggacttgattttgaccgactgcagttttgtcccaaagatactcaactcaaatattttgaaaaacagtttgaactgtcagaacaaacaaaattaccaatgtttcttcattgtcgaaactcacatgctgaatttttggacataatgaaaagaaatagagatcggtgtgtagggggagtggtgcattcatttgatggtaccaaggnagcagcag

SEQ ID NO: 1290 - DNA, 490 bp, Homo sapiens
cgccgccgcctgtgctgcagccatgtctctagtgatccctgaaaagttccagcatattttgcgagtactcaacaccaacatcgatgggcggcggaaaatagcctttgccatcactgccattaagggtgtgggccgaagatatgctcatgtggtgttgaggaaagcagacattgacctcaccaagagggcgggagaactcactgaggatgaggtggaacgtgtgatcaccattatgcagaatccacgccagtacaagatcccagactggttcttgaacagacagaaggatgtaaaggatggaaaatacagccaggtcctagccaatggtctggacaacaagctccgtgaagacctggagcgactgaagaagattcgggcccatagagggctgcgtcacttctggggccttcgtgtccgaggccagcacaccaagaccactggccgccgtggccgcaccgtgggtgtgtccaagaagaaataagtctgtagg

SEQ ID NO: 1291 - DNA, 66 bp, Homo sapiens
gtgaaaacttgagaggcactctgccctcttccctataaaatcacacagcgtgattttacaaggtcc

SEQ ID NO: 1292 - DNA, 566 bp, Homo sapiens
aaactttagaaaataaaacttttaatacttaagagataacatgatgcaaacgttgcttgttggccagactttccaggactaagaccctctgggaatcaatggggctcggtgacatggcgtaacctgctactggggtgtggtctcagacacaaaatcacactggatgttggtctacagaggcaggattctctcattgctggatgactcttgaaatgaagcctttgcctttgttacacatttggctttacaatcttcattgacaaatagttcggcaaagagtagaggagcacggccacgaagagcagcaggataagcaggaacagcaagccgatgatgacccacttaaagcggcgccacacgatgaacttcatggtcttgcatgggttggtgaaccagaggaaggaggtttctggtcgatttggtaagtccagcttggggttcatgttgggttcgtcccgccccttcccggctggcctctcgtcggcctccttctcgttgaggatttccaatgtcatctccactttcccagccattacgcgggcgccatctttctctgcgtagcatgg

SEQ ID NO: 1293 - DNA, 206 bp, Homo sapiens
gggctgttaattgtcagttcagtgttttaatctgacgcagacttatgcggaggagaatgttttcatgttacttatactaacattagttcttctatagggtgatagattggtccaattgggtgtgaggagttcagttatatgtttgggattttttaggtagtgggtgttgagcttgaacgctttcttaattggtggctgcttttagg

SEQ ID NO: 1294 - DNA, 483 bp, Homo sapiens
ccagagctcaaccaggacacagtaatcggtggtgaggttgagtacagtggtagataggcagggagtgagcccggtgttgcaagcccagatggtcccggcgggagcagccagatagtaggacccgtcgctcgccttctgggtggtattacacagggcctgatgggttttgggaactgctcctacgcagagtccctgcccggtcacttcggacagggtcagcttgtgttgggaggccacggagcagttagctggggcagaggtatggttggagtaggtacctaggacggcaaccccttcgtagtaggggggtcccgataccagacacagccagcactcttgggttctgtcgggactggtgaggttgagtgcttgataggctccttttactaggtttagcagcctgtcccccgtcccaggttgttgagaaggcgggggagccccaggcaccatagaggccgcgcctgaaggaggaggatgaggagg

SEQ ID NO: 1295 - DNA, 599 bp, Homo sapiens
aaaatggcctgcaaggaggacgtgttgaagctttgcccaaacataaaaaagaaggtggacgtggtgatctgcctgagcacgaccgtgcgcaatgacactctgcaggaagccaaggagcacagggtgtccctgaagtgccgcaggcagctccgtgtggaggagctggagatgacggaggacatccgcttggagccagatctatacgaagcctgcaagagtgacatcaaaaacttctgttccgctgtgcaatatggcaacgctcagattatcgaatgtctgaaagaaaacaagaagcagctaagcacccgctgccaccaaaaagtatttaagctgcaggagacagagatgatggacccagagctagactacaccctcatgagggtctgcaagcagatgataaagaggttctgtccggaagcagattctaaaaccatgttgcagtgcttgaagcaaaataaaaacagtgaattgatggatcccaaatgcaaacagatgataaccaagcgccagatcacccagaacacagattaccgcttaaaccccatgttaagaaaagcctgtaaagctgacattcctaaattctgtcacggtatcctgac

SEQ ID NO: 1296 - DNA, 490 bp, Homo sapiens
aaattataagtattgtgaattcacactctcaggctattgtctgacttgatctacgtctcataaagcctgtacctgagtggagtggaaggtggagtcttaggttaatcagttactgactctaccctcaccctctttcaattgaggtaaactttgctgtttttctttttcataaagcattctcaaattgttgagtttattgctgaaaaaaaatctccatgactttacagatagaattacaaactaaatgatgtcttgtatttagaagcagagtacagacctaacgaactgttagattctccaccatcacttagggtttgcccagaagcaacaccagagaattacagacaacgcgcttttgctgaactgtccattttggtggttgtgtttttcagtcaaatataagcaggatgggcgatagagatatatttatatatagatacatattctatatatctaatgcctaaatatgggtattaaagggaaaattttt

SEQ ID NO: 1297 - DNA, 561 bp, Homo sapiens
aaaacccaatgtgtttacgaaaaccacaataagataccactttatatccgtcaaaatggctatgattaaaaaaaggggggcaggggctgcatacagtggctcttgtctgtattcccagcactttgggaggccaaggcaggaggactgcttgagcccaggagttcaagaccagcctgggcaacatagttaagaccttatctctacaaaaaaataaaaaattagctgagcgtggtggcacatgcctgtagtcccatctactcaggaggctgaggcaagaggatcacttgagcccaagagttcaaagccacggtgagccatgactgcaccactgcactccagcctggacaacacggtgagaccctgtctcaaaagaaaaaatgaaagttaaacataaaagctaatccaacaattccacttctgggtatatacctaaaaaaagcagggactcaaacagatacttgtacaccaatgttcacagaaacattattcataatagccaaaatgtggaaacaacccaaatgaccatgaacaaataaatgaataaacaaaatgtagtatata

SEQ ID NO: 1298 - DNA, 519 bp, Homo sapiens
cgaccctgatatccaccattatgggccctctgatagtacttttattaatcctactcctcggaccctgcattctcaaccgcttggtccagtttgtaaaagacagaatttcggtggtgcaggccctggttctgacccaacagtatcaccaactcaaatcaatagatccagaagaagtagaatcgcgtgaataaaagattttattcagtttccagaaagaggggggaatgaaagaccccaccataaggcttagcaagctagctgcagtaacgccatthtgcaaggcatgaaaaagtaccagagctgagttctcaaaagtcacaagaaagtttagttaaagaataaggctgaacaaaactgggacaggggccaaacaggatatctgtggtcgagcacctgggccccggctcagggccaagaacagatggtactcagataaagcgaaactagcaacagtttctggaaagtcccacctcagtttcaagttccccaaaagaccgggaaaaaccccaagccttattt

SEQ ID NO: 1299 - DNA, 571 bp, Homo sapiens
ctggaacgtcagcccagcgagccgaactgatcgcactcacccaagccctgaaaatggcagaaggtaagaagctaaatgtttacactgatagccgctatgccttcgctacggcccatgttcatggggaaatatataggagacgggggttgctgacctcagaaggcaaggaaatcaagaacaaaagcgagatcctagccttgctgaaagccctctttttgccaaagagactcagtattatccattgcccaggacatcagaaaggagacagtgccgaagccagaggcaaccgtatggcagaccaggcggcccgagaggcagccacaaaaacagttccagaagcctctacactccttatagaggactcgaccccgtacacgcctgcctatctccattacaccgaaacagatctaaaaagattgcgagaactgggggccacctataatcagataaaaggatattgggtcctacaaggcaagccggtgatgcccgatcagtttgtgtttgaattattagactcccttcatagactcacccatctcagccctcaaaagatgaaggcgctccttgacag

SEQ ID NO: 1300 - DNA, 468 bp, Homo sapiens
aaagatacactaaaatgaaaatctctaagagaaaatgtcttctttaggacatgaaggggtaatatatggggtataacagaaccgtatgtacgctgcctgtgacctttgtggacgtttgcctgaattctcacctgggagtgaatggagcaatggggctaaggtcattgggggatgtttggtttttgtggtgtatgtggcagtttctctggggctgggggagtgtaaggataagaagcaagtgaggttgggcacggtggctcacccctgtaatcccagcattttgggaggccgaggtgggtagatcacgaggtcaggagttcaagatcaacctggacaagcttgaacccgggaggcagagattgcagtgagccgagatcatgccactacactccagcctgggcgacagagtaagactccgtctcgggggcggggcaagcaaatgaaacaagatggacaaaaaaaaaaccg

SEQ ID NO: 1301 - DNA, 505 bp, Homo sapiens
gtttccagggccgagcagaagtagtgagtttgcttctggaccgaaaagccaatgttgaacatagggcaaagacgggtcttacccccttgatggaagcagcttctggagggtatgcagaggttggaagagttcttcttgataaaggagcagatgttaatgctccccctgtgccttcctcaagagatactgctttaacaatagcagcagacaaaggtcactacaaattttgtgaactcctgattcataggggagcccacattgatgttcgtaacaaaaagggaaatacgccactttggctggcatccaatggaggtcattttgatgttgtgcagttgctagtgcaagcaggtgctgatgtggatgcagcagataaccggaaaatcacacctcttatgtcagcatttcgcaaggaactgttgaaaaaatgtcatcaatgtgtcgaaaccattgtgaaggctaaagaccagcaagctgcagaagcaaataagaatgcgagtattctttt

SEQ ID NO: 1302 - DNA, 570 bp, Homo sapiens
ctgggccaagtaggagagggaagaggtgatatgagcctcctctgtgctctgacagagaaatgtccaattccagatcaaaggcatcattgccaccctctcctctccttcctcaaagaaaactttctggcctggagggaaatagttaagaactgaaaggccagggggtctggaggaaaaaaaccctctactattcccacaaggcagtgaggggtgataagggtgctagtcacagccctgacagcttcagaaagggtacccacattacctctgggttacccagcatccagagccccaagggacctagctctcccggatatatattcctgcaatggactgacctttttacccacttgtctctggtggtgggagagcactctgaaccagaaaccaacaaggaatccacttcccacccaacttaagagtgtatgcacacatgtggatacacatgcacctccccactactcacacagaccccaacccccttcatgtcttttgaggggggctcaaactactggtgcctggggacacaagcaagacctgggtccatggaaatgtgtgtgtgtgtgcata

SEQ ID NO: 1303 - DNA, 494 bp, Homo sapiens
gtacagcagcctttctacctctctgggactctgagacaggaaatcttcaaggaggagtttttccctccccactattcttattctcaacccccagaggaaccaaggctgctgtacccacctcagggacagaactccacactatagtgggaaagcttcagggacccctccttttagtgctcagggctcacctatgctactggtccttttggcaaaaaaggaaaatgatagagccagggttgcccctgatgtagcagccttactgtggaggggccaaagctggtgttcagagctcacccaaggagggaggtgataaggtgtcatgcgttctgctgaacccactggctggtatgaacatgaggcttggggtgagggaaaccaagtaggggttggagaaggagcagcacctttgtaacacctggctacccatagctagctttctgccctcaaaaactcagccttcaagggatccagcccacacacgccacaggcagcag

SEQ ID NO: 1304 - DNA, 524 bp, Homo sapiens
ccagtccgatcagccacacagcagcaccgatgggcctgcccgccctttccaaacttgaggctctgtccaccaaatgcacgctgataaatcttcccatcttcagttctgctgaacggcatgccataattttctagctcgaccacggcggcgggggcctgctccgtcatgtagtggatggcatcctggtcccccagccagtcggagcccttcacggtgtcgtagaaatgccacctccagttgtcctcctccatgttccccagagcagcattgattcctccctgcgctgcaacagtgtgtgacctggtaggaaacagcttggtaacacatgctgtattaaaccctgcctcagaaaggccaaatgcagctcgcaagcctgcccctccagcgcctaccaccactgcatcaaattcatgatccactactggatactgagcagaaatggaatctgaaactttagcagatgccctcttgttcccatcaacagtgaagtgaaaacctcgggttcctgtttgcaacactgttgg

SEQ ID NO: 1305 - DNA, 495 bp, Homo sapiens
aaaaagtatttttagcacaaaaaagttttctttatatcatactaaattcagagcattacatcattcccagaatacctagtttgaagcttatttttttttccattcacttgcaagctggattaagacattaactataataatatggaatgttcagcatttatgtttggtaaccagatgtatatggtttgtataaccatactttagaatttagttcagataaattggttttggtatactttgactacagaaagtgatttcaacataagatgtgatgaaggaagtctcccatgaaaaacttagtaaggatcaactgatgctatggacaaaacctaaaaaaagagatttgtagatgctttcaaggctttgactatgaaatatagaaaactggatgggcattcttactgaccggatgcttacaatttcaaatgaagaaactactagccactctaaaaattggattagggaaaaaagtgattttagaacagtcttccattt

SEQ ID NO: 1306 - DNA, 545 bp, Homo sapiens
gttttggttactacagttttgtagtgtattctgaggtctggtagcatgatacatccagctttgttctttttgcttaggatggctttggctattcaggatactttttgattccttaaaatctctttggatttttttttaattttgtgaagaatgttcataggtattttgatagagattgcattgaatctgtaggttgcttttgagtagtactgccactttaacaacattcatatttctgatccatgagtatgaatgtcttttcatttgtttgtatcctcttcaatttctttcattagtgttttgtagttttcattttacctccttagttacatttatgtctgggttttttttttttggtaactattgtaaatgggtttgccttcttaatttctttttcagcaagtttgttgttcatatataaaaatgcaaccaatcttcatgtattagttttgtgtcttgcaacttcactgaatttgtttgttctaaaagttttctggtagtcttcaggttttcctatatataagatcatgtcatctgcaaatagg

SEQ ID NO: 1307 - DNA, 516 bp, Homo sapiens
ctgacacagccagtgtaagcagcctgagtctgtctacaggacacacgaagcgcatcgcattcctgtttgactccactcttactgccttcttaatgatgggaaatctttcaccaaacttgaaaagtcatgcagtcacaatgtttgaagtaggcaaactctcagatgagtctctggacagctttcttatagaactagaaaagtatcttgaagacttcagccatatttgctcttaaccacctttttccccgttcagagcactggtgaaggagaagcacagagatattttgatcatgcacttactctgagaaacacaatactgtttctgcgtcataacaaagatctagttgcgcaaactgcacagccagaccaacccaattatggttttcctctggatctcttacgctgtgaaagccttcttggtttggaccctgcaacttgcagcagagttctaaacaaaaattacacgctgcttgtwtccatggctcccctcaccaatgaaatccggcctgtcagcag

SEQ ID NO: 1308 - DNA, 537 bp, Homo sapiens
ctgttacagtgacaagagataaaaagatagacctgcagaaaaaacaaactcaaagaaatgtgttcagatgtaatgtaattggagtgaaaaactgtgggaaaagtggagttcttcaggctcttcttggaagaaacttaatgaggcagaagaaaattcgtgaagatcataaatcctactatgcgattaacactgtttatgtatatggacaagagaaatacttgttgttgcatgatatctcagaatcggaatttctaactgaagctgaaatcatttgtgatgttgtatgcctggtatatgatgtcagcaatcccaaatcctttgaatactgtgccaggatttttaagcaacactttatggacagcagaataccttgcttaatcgtagctgcaaagtcagacctgcatgaagttaaacaagaatacagtatttcacctactgatttctgcaggaaacacaaaatgcctccaccacaagccttcacttgcaatactgctgatgcccccagtaaggatatctttgttaaattgacaacaatgg

SEQ ID NO: 1309 - DNA, 585 bp, Homo sapiens
gcaggtgatgagctctgttatggacatgctgagtgtgaaaagcctgtgggatatccatatatttatattaagataattgaatataggaaactagagctaagaagagagaaacttgagggaaatatggatttgaaagttaccagtatgttgggaccacagcagagaatatgaagattatatagcaaaatagaggtcaaggaagtaggaggagaattaagacaagtgaatgagtttcaagaaagggtatatagtctaaaagtagtctgagaacaagaaacagccctctccatctccagtttccgcatctccagtttctggcaaccactctcttccttagctccctaaagcctaggaatgctaatggagcacattttatgctggttctacacacgtctttatgatagcacccctacaccctgtccacacctttgtaaatattctctttatcaaattatcccagtttgagtatatcattgattcctgctggaacccatataatgaagttatattttaccctatggtgagtatggggagacacataggaattgtaagaaagagagatactgatcagatttgcttttcaga

SEQ ID NO: 1310 - DNA, 463 bp, Homo sapiens
ctgagcaagccttcgctggcctcttttgacgccatctttgtggatgaggcccaggactgcacaccagctatcatgaacatagttctgtctcagccatgtgggaaaatctttgtaggggacccgcaccagcagatctataccttccggggtgcggtcaacgccctgttcacagtgccccacacccacgtcttctatctcacgcagagttttcggtttggtgtggaaatagcttatgtgggagctactatcttggatgtttgcaagagagtcaggaaaaagactttggttggaggaaaccatcagagtggcattagaggtgacgcaaaggggcaagtggccttgttgtcccggaccaacgccaacgtgtttgatgaagccgtacgggtgacggaaggggaattcccttcaaggatacatttgattggggggattaaatcatttggattggacagaatcattgata

SEQ ID NO: 1311 - DNA, 500 bp, Homo sapiens
ctgccccccacccttcccttcgatgacaacgtttgcaggcttcagggggaccagggaacaaagctggggcctggcagccccactacgctgccagccggggagaacaagtcacaattacaaattatcacaacaattagcgcctgtacttgggggatctgcaaattgaggaggccccagctcctcattgtacacgggtctatttggcagtgaccttgctctggagacgatgatattccttcagcctgagggaattgatgttgatgaacccggtggcatcagttggctcataatcaccctgcacgttcatgctcaccagctcctcattgtagagagacagtggggactcccggccgaggatgtacacctggcccttgaggacggacacctgcactttcccttccactcgcccctgggacttggcgatgcagtggcggacaaattcacactcagggctgtgccagaaaccggtatacaccagctcagcaaatttcaagcccagg

SEQ ID NO: 1312 - DNA, 429 bp, Homo sapiens
aaatattttatgatgatacatatacaaatataatcttccaaaaaacaaatgtaaaactaatacaaatcactttttcaggaacaaagaaaatcatttagaaaatgtgattatgctaaaagaggcaggttaggtttccaaggctgctcaaggtggaagcttaagaccaacttttgtttgagtacacaagtgatatttacattttcatatactagtgatatacctgttgcatacttggcaaaataaaactgatagtaagtctataataataaaagaaacaacaattactaagtaaacaattctagatgatggaagagtaacctccatttaagctacagacttagatgtctaaaaatatgtgtcctgatctgtacagttagtgggagcacactatataaatcctttgcatgacaccattcaacaatatttttt

SEQ ID NO: 1313 - DNA, 79 bp, Homo sapiens
ctttyttttttttttttttttttggkggtttaccttctttattccactatgtataactattttgyaggttcaaagaatc

SEQ ID NO: 1314 - DNA, 528 bp, Homo sapiens
ccagatggttggactgcggtgacaagagacggaaagcggtctgctcagtttgagcacaccctcctggtcacagacactggctgtgaaatcctaacccggcgacttgacagtgcacggcctcacttcatgtctcaattttaatttctcccaagatggcacatctcagtaccttcttactgtgctatgcattttattgagagtacagaaaggaagaggaacctttttttaatcacttgttttgttttgactatagataagaaaggactacagcatttgatgtgtgtcctcaagaacttgtcttgggtctgaaaaagctgagaagaataaaggaaacattgctcaactcttcagccccctccccctgcacacctgttttctcatttgccctttgagcacttttacttaaacttgcttgtagttgcttttatcactgccgcaaaacagccatcaagagccatctgctttccaggtgaacattggaaatgagaatctttgaaacttagcaatatgtgttgcaccagatttttt

SEQ ID NO: 1315 - DNA, 390 bp, Homo sapiens
ctcctctcctctaggccgtcgctttcgggttctctcatcgcttcgtcgttcgccaatgtttgaggagaaggccagcagtccttcagggaagatgggaggcgaggagaagccgattggtgctggtgaagagaagcaaaaggaaggaggcaaaaagaagaacaaagaaggatctggagatggaggtcgagctgagttgaatccttggcctgaatatatttacacacgtcttgagatgtataatatactaaaagcagaacatgattccattctggcagaaaaggcagaaaaagatagcaagccaattaaagtcactttgcctgatggtaaacaggttgatgcggaatcttggaaaactacaccatatcaaattgcctgtggaattagtcaagg

SEQ ID NO: 1316 - DNA, 419 bp, Homo sapiens
ccagccatctggtttcagccggaagctaacaccctcattctgagtccaggctagtgggtggtggctgaggacccagttggttgaggagtccaactagaaaccaggagaggtagcagaataattaaacccctataggggtggcaagggcctctggccctgggtggaatgtcccatttcctccatcactgagtgggcttccccaaggcagaaaggtttgtcccggagcaagaattttgtttgaatgcgtgtaacttaaattaaccttgtggacctctgctcagctccgctcggctctgcccgatgagctccatccaggctccgcttgccggtggaaaaggctccttagaagccggcaatgagctccatccccacgcggtgccagtgtgccttccgctcacccctcggaggggtgatgaagg

SEQ ID NO: 1317 - DNA, 584 bp, Homo sapiens
ccttctaattagcatcaaaaagttcctggattcccaggcacgcctcctgaaaaagctgagagatatgtctctttccagtcttcttgggtgaggctaggttgcaagctctgggctgttcaaaggttgccagaatctctccattggagggatagaagcagtgtccctattctgacttgtcagagagtgagcttgtgacccttgaaaggtggtgggtatcccttctcatcccctcggacctccacagttgatgcgtatgtctcccaggggaattaggtcacttaactcaagagcaatgtttgcccaggagcaagcaatgctggggagctttcctctagattggaaatggttcttgttgccctaccaggaaaagaattaagaaaacaaccctaaccattgtctcagtactttgtactgattgaagaaaaccacctctctgacaagcgctaatagcatctactacatttaatgtcatagattcttatttagcaagtgagctggattcgttgcaaacattcacaacttccattcagagaggctggcagatgtcagatggaagaaaaaccccggaggccagatctttactg

SEQ ID NO: 1318 - DNA, 502 bp, Homo sapiens
ttaagacctgcaataatccagaatggctactctgatctatgttgataaggaaaatggagaaccaggcacccgtgtggttgctaaggatgggctgaagctggggtctggaccttcaatcaaagccttagatgggagatctcaagtttcaacaccacgttttggcaaaacgttcgatgccccaccagccttacctaaagctactagaaaggctttgggaactgtcaacagagctacagaaaagtctgtaaagaccaagggacccctcaaacaaaaacagccaagcttttctgccaaaaagatgactgagaagactgttaaagcaaaaagctctgttcctgcctcagatgatgcctatccagaaatagaaaaattctttcccttcaatcctctagactttgagagttttgacctgcctgaagagtaccagattgcgcacctccccttgagtggagtgcctctcatgatccttgacgaggagagagagcttgaaaagctgtttcag

SEQ ID NO: 1319 - DNA, 478 bp, Homo sapiens
aaagcacttatttttattgtgacatcatcaatttgcaaaacctgcaatagtaatacgaagtgtttccttgcaaaatcctgattctgtagtccacagcatcccaagcataaaacagccaggtttcttacaacaggatgaatacttattattccaggaagaatcaaagattcgatgattccattcatggttgcacttaagcctgttgaaatggacatctgcttcaacagttcatagcataaaataagacatttctgcaatgtttcagcatcattcttctctatgtggacttctttaatttcaagttgctctgtctctttcaaaaggtttattctggcatcttctaatgcttttatttcttcttttaattctgatgcccgattaaaatcctgtaaggtaatgcaattttccaaagcttctttggcttcgataagcttaacttttatttcagccatcttgagttctttctttcttacatcag

SEQ ID NO: 1320 - DNA, 559 bp, Homo sapiens
cctcgtatccatgagccccacttaacagggagcccacatttacacatacacaaacatatgcagtcagtaatgcacaattacaaaccacctagatcagggtacccacaactagaaagaacatatttccacatcggcctgggacaggtctggtttatgccttttgatctggtgtaattaatagcatcccctttctctctcaatagtcccaatttgggcaacgaattatatggtgattcttctacctcaaacaaacatggtttatgataaagacatgatagtaaatgccaacatgatcctgtaagacagccctaataaagccaacaaatgacaatgagaaaaagaggggtaaatgagactctgcagacagggtcacattctatgggggctaacttactaaacagtggcaagttttaagctcactttatgcaccaaggtttaatttggtctcagctaaagaagacaaaattccaaacacaaacagcaggggagaggtgcagtgaggcttgctggagggacctgtggaggcagctcaggccagaaaacacaagtctgtcaagtg

SEQ ID NO: 1321 - DNA, 163 bp, Homo sapiens
ctgtctcttacttttaaccagtgaaattgacctgcccgtgaagaggcgggcatgacacagcaagacgagaagaccctatggagctttaatttattaatgcaaacagtacctaacaaacccacaggtcctaaactaccaaacctgcattaaaaatttcggttgg

SEQ ID NO: 1322 - DNA, 488 bp, Homo sapiens
catggactcgagtgtaccgagtacagagggatattccaatgcctttagttagctcaggagtagagcatggtaacctgagagagctggcacttgcaagaatgaaagacctcggaatacagtgtcgagatgtgagaaccagagaagttggaatccaagaaattcatcacaaagtacggccataccaggttgaattggtaaggagagattatgttgcaaatggtggctgggaaacattcttgtcatacgaagacccagatcaagacattttgattggcctcctacgattacgcaagtgttcagaagaaactttccgtttcgaattgggtggaggtgtctccatagtacgagagctgcatgtgtatgggagtgtggtccctgtgagcagccgggatcctactaaatttcagcatcagggatttggcatgctgctgatggaggaagcagaaagaatagctagagaagaacatgggtctgggaaaatcgctgtg

SEQ ID NO: 1323 - DNA, 536 bp, Homo sapiens
aaagacacattcctactactcacattaatccatctccctcacgtttcaggtttgctggaaggaaaagtagagaaataatggagtagagaagtgggagaatccagatgaccatctgaaatcacattactgaaaatacaacagacatgacccaaaaatctgatcttactagtttccttcaggatcaaatccaggatattttattgtacaaaaatttcaaatgatttcagatgatgcatatgtgacagcaaacctgaatggcacaatggaacacagacttaaaagatgcttcagtggtcaacactcattctggagttctcatgaatgaagggtagacagattcagtaaaattgtttgcttttcagtttcattatctggtcttcaaatttcagcacagagcaattcatttccatatagtaatatgtaaagagagactacaaaagtgtgaggaaagcaaatgtcctcgagaagggtcagaaaaggaaaggaagactcagtatctacaacccattacctaagaacaccattttgttccattt

SEQ ID NO: 1324 - DNA, 583 bp, Homo sapiens
  misc_feature 558: n = A,T,C or G
aaattaaaaacgattttgaaaaattacatctatatttaatccctaagaagtgttttaagctggtaatgcagctcgctgtagctctaagagaggggttagtcaggaatctgatcttgagccataaaggttttcaggctaaacaaagaacaaatttaagtgacggaaaatatttataattccaatataactcagttatattgttataaaaatacccatgctagcatgcaactgcctatatatgtgtgcatatatatatatatatgtctgtgtgtgtgtattgatccattcaatgtcaatattttggaacccagacaattttctcattttctagtgaatgggaggcacataatcccaccacaaaaaaaaaaacacgaaaaaacaaccccacaggaaccttccatatatggctgcatattaacaattttaatatttgctcagccattccaacacacaccaaaaaagttctcctagaagcagcaagaaatatttgatgtgttaactaccaagctgatgtattttgctttctcctataaacattaggtggtacacggtaatttnacaattggtacatctctcagaccac

SEQ ID NO: 1325 - DNA, 552 bp, Homo sapiens
  misc_feature 527: n = A,T,C or G
ccaacaagtttgacccaaaggtagatgataatgctcttcagtgcttagaagaatacctacgttataaggccatctatgggactgaactttgagacacactatgagagcgttgctacctgtggggcaagagcatgtacaaacatgctcagaacttgctgggacagtgtgggtgggagaccagggctttgcaattcgtggcatcctttaggataagagggctgctattagattgtgggtaagtagatcttttgccttgcaaattgctgcctgggtgaatgctgcttgttctctcacccctaaccctagtagttcctccactaactttctcactaagtgagaatgagaactgctgtgatagggagagtgaaggagggatatgtggtagagcacttgatttcagttgaatgcctgctggtagcttttccattctgtggagctgccgttcctaataattccaggtttggtagcgtggaggagaactttgatggaaagagaaccttcccttctgtactgttaacttaaaaatnaatagctcctgatccaaaaaaaaaa

SEQ ID NO: 1326 - DNA, 453 bp, Homo sapiens
ctggcctggagcggtaccgagccatcacctcggcgtactatcgtggtgcagtgggggccctcctggtgtttgacctaaccaagcaccagacctatgctgtggtggagcgatggctgaaggagctctatgaccatgctgaagccacgatcgtcgtcatgctcgtgggtaacaaaagtgacctcagccaggcccgggaagtgcccactgaggaggcccgaatgttcgctgaaaacaatggactgctcttcctggagacctcagccctggactctaccaatgttgagctagcctttgagactgtcctgaaagaaatctttgcgaaggtgtccaagcagagacagaacagcatccggaccaatgccatcactctgggcagtgcccaggctggacaggagcctggccctggggagaagagggcctgttgcatcagcctctgaccttggacctcggccg

SEQ ID NO: 1327 - DNA, 454 bp, Homo sapiens
aaataccatattatatttactaagttaagagctagtttttactctcttccataatttcattacatgaatgtaagatgatggctcaaaaatgccgacttatagtttgaatttatgtgtatgcaatatacatatgagaaccaaattcaacaagtgacatgaatgttactacatgaacattgaattgtattgcccttgtcagttatttcctctgttcaataaatactgaaggtcacaaacacctttttacttttcaagagtttgccttctcttctcgattttagtaattaatttggatatttttcctcccatgcctcttcatctgatttagtgggatgttttcaataccagcaaaacaaaagaacaggaaaagtattttgcaaactcatctactggaagctaatctccttaaggtcaagcaaaaagggtcaatttcaatttcaaagagctgttcttt

SEQ ID NO: 1328 - DNA, 478 bp, Homo sapiens; identical to SEQ ID NO: 984

SEQ ID NO: 1329 - DNA, 494 bp, Homo sapiens
ctgatgcaaaactacagagaagcaagataacaaaatactgttatcaatctatggagaaatcagccagccatgatgaaaaaatgagtcctgccgactatctgccagcttcatgctcagaacccttaaaaacacagaatctaaattaaaatacatgaagctttcacaatccggttaaaggaaaaaggtaactgtaaataactggttaaagtgtgctcattcgttcagaaattagatacaaacatgcaagaattaaagactctgatttaataaaatcagtagtaacaggtcttgagattaaacaactgacctgagggcaaatgggaccaatcagtccctgaaccctacctgacatgtcaaatccaacatttcacatgctgacctaatattgaggttaatttccagaagtaactgcacttttcaacagattaagtcctacaaaattaggctctcgtaccccaaatggtcatggcctacgcctaggtgggaggcacttt

SEQ ID NO: 1330 - DNA, 445 bp, Homo sapiens
aaaaaactagtattacaatgtttaatgtgatgactttaatcagtagtagcttcagtttccgctgggcccctaattagtcttcgaattcctctttttcctgcaggaccttttggttttgcaaaactttgcttgtgtgcatgctgcttgggatgtacttcttcataaaggaagtctgcagtcaactcatccccattgtctatctcgatctttctaattacatccatttgtagttgtctttctacaatttctagcagacggctcttgcagctagaatacagcatccgctctcttatactgcatgtgtatccaggcattgaataaataaaaactatggactctaaatagtctccttcatgggaatgtttatacagaaagaaatggyaacgagctgaatccttgggaatcctctttggcaaatctttcagttctgtatttgttgtgttgg

SEQ ID NO: 1331 - DNA, 566 bp, Homo sapiens
ttggtgcacaaaatactgtcatttgctcaaagctggctgccaaatgtttggtgatgaaggcagaaatgaatggctcaaaacttgggagaagagcaaaacctgaaggggccctccagaacaatgatgggctttatgatcctgactgcgatgagagcgggctctttaaggccaagcagtgcaacggcacctccatgtgctggtgtgtgaacactgctggggtcagaagaacagacaaggacactgaaataacctgctctgagcgagtgagaacctactggatcatcattgaactaaaacacaaagcaagagaaaaaccttatgatagtaaaagtttgcggactgcacttcagaaggagatcacaacgcgttatcaactggatccaaaatttatcacgagtattttgtatgagaataatgttatcactattgatctggttcaaaattcttctcaaaaaactcagaatgatgtggacatagctgatgtggcttattattttgaaaaagatgttaaaggtgaatccttgtttcattctaagaaaatggacctgacagtaaatggggaacaa

SEQ ID NO: 1332 - DNA, 471 bp, Homo sapiens
cctgcatggattccatgttcatgagtttggagataatacagcaggctgtaccagtgcaggtcctcactttaatcctctatccagaaaacacggtgggccaaaggatgaagagaggcatgttggagacttgggcaatgtgactgctgacaaagatggtgtggccgatgtgtctattgaagattctgtgatctcactctcaggagaccattgcatcattggccgcacactggtggtccatgaaaaagcagatgacttgggcaaaggtggaaatgaagaaagtacaaagacaggaaacgctggaagtcgtttggcttgtggtgtaattgggatcgcccaataaacattcccttggatgtagtctgaggccccttaactcatctgttatcctgctagctgtagaaatgtatcctgataaacattaaacactgtaatcttaaaagtgtaattgtgtgactttttcagagttgcttt

SEQ ID NO: 1333 - DNA, 558 bp, Homo sapiens
  misc_feature 522: n = A,T,C or G
aaattattaaactcccttcatagactcacccatctcagccctcaaaaaataaaggcgctccttgacagagaaaaaagcccctactacatgttaaacagggacagaactcttcagtatgtggcagaatcctgcacagtctgtgctcaagtaaatgctagtaaagccaaaatcggggcaggggtacgagtacgcggacatcgaccaggtacccattggaaaattaacttcactgaagttaaaccagggctgtacgggtacaagtacctcctggtgttcgtagacaccttctctagctgggtgaaagccttcccaactaaacgtgaaactgccaaggttgtgaccaagaagctattaaaagaaatattcccaagattcgggatgccacaggtattgggttccgataatgggcctgccttcgtctcccaggtaagtcagtcggtggccgatttactggggatcgattggaaattacattgtgcttatagaccccagagttcaggtcaggtagaaagaatgaatagnaccatcaaggagactctactaaattaacgcttgcag

SEQ ID NO: 1334 - DNA, 142 bp, Homo sapiens
ccatctcccagaaagtttaacaaaacccgaccaggttgcccccttcaccttcttacaacctcttcccctttccccaggggtcctgtcctccactccagatcattcctttaghttagagctgggcaktgaagtggatatcacc

SEQ ID NO: 1335 - DNA, 545 bp, Homo sapiens
aaataaggcttggggtttttcccggtcttttggggaacttgaaactgaggtgggactttccagaaactgttgctagtttcgctttatctgagtaccatctgttcttggccctgagccggggcccaggtgctcgaccacagatatcctgtttggcccctgtcccagttttgttcagccttattctttaactaaacttctttgtgacttttgagaactcagctctggtactttttcatgccttgcaaaatggcgttactgcagctagcttgctaagccttatggtggggtctttcattcccccctctttctggaaactgaataaaatcttttattcacgcgattctacttcttctggatctattgatttgagttggtgatactggttggktcagaaccagggcctgcaccaccgaaattctgtcttttacaaactggaccaagcggttgagaatgcagggtccgaggagtaggattaataaaagtactatcagagggcccataatggtggatatcagggtcgtgaaccatggggacctgttaacagt

SEQ ID NO: 1336 - DNA, 562 bp, Homo sapiens
ccagtgtttgcctaaattctctgaagcatatcaaggagtctcagttacgcaaaacaaccttgggcaaccacaaagaagagggatgcacatctcccagaaatattaaatagctgtatctcaactacagtttcagaatttagaaccaccaattcaagatggaaatatgcagtgggaagagttattaaaaaggtaacagaatttgactaagagcatgaaatgcagaactttaagattaaaagagctccctggaaggacaatgaggcatatggagcagaagggaaagcagggaaacggctgagatagtttaattacaccaactctactatgcagcatccctttatcaaaaggaaaaatataaagtctataaaaaatattttagtattgcaaactgctgcaataatttattgtaggcaaatggtagctataaagagggtccttgacccctaaaagaaaagaaaaagtacagcaagtttctaattagtagaactaactagttgtttttttgttgggagagcggtataggaaaggagaatacattttctcccatctcagaaagattttt

SEQ ID NO: 1337 - DNA, 567 bp, Homo sapiens
ctgcctataaaactagacttctgacgctgggctccagcttcattctcacaggtcatcatcctcatccgggagagcagttgtctgagcaacctctaagtcgtgctcatactgtgctgccaaagctgggtccatgacaacttctggtggggcgagagcaggcatggcaacaaattccaagttagggtctccaatgagcttcctagcaagccagaggaagggcttttcaaagttgtagttacttttggcagaaatgtcgtagtactgaagattcttctttcggtggaagacaatggatttcgccttcactttcctgtccttaatatccactttgttgccacacaacacaatggggatgttttcacacactcgtaccagatctctatgccagttaggcacattcttgtaagtaactctcgatgttacatcaaacattatgatggcacactgggcttggatataatagccatctctcagtccaccgaatttctcctggccggctgtgtcccatacattgaacttaataggtcctctgttggtgtggaacactaggggatgaacctcaacacc

SEQ ID NO: 1338 - DNA, 606 bp, Homo sapiens
ctgtacttgaactggagggcaagaagtggagagtggaaaatcaggaaaatgtttccaacctggtgattgaggacacagagctgaaacaggtggcttacatatacaagtgtgtcaacacgacattgcaaatcaagggcaaaattaactccattacagtagataactgtaagaaacttggcctggtattcgatgacgtggtgggcattgtggagataatcaacagtaaggatgtcaaagttcaggtaatgggtaaagtgccaaccatatccatcaacaaaacagatggctgccatgcttacctgagcaagaattccctggattgtgaaatagtcagtgccaaatcttccgagatgaatgtcctcattcctacagaaggcggtgactttaatgaattcccagttcctgagcagttcaagaccctatggaacgggcagaagttggtcaccacagtgacagaaattgctggataagcgaagtgccactgggttctttgccctcccttcacaccatgggataaatctgtatcaagacggttcttttctagatttcctctacctttttgctcttaaaactgcttctctgctctgagaagcacagctacctgcc

SEQ ID NO: 1339 - DNA, 416 bp, Homo sapiens
aaaatcagcaataataatcggttatagcagagttaagggatcaaacctgaagtttaggacatcaaatgactgtctacttagatgtaatataatgctcaatttcttgaaatcattgatttatttagaatcagaatagaagaaagcaatacacgtttatcttaatagacagctaggagagtcatttatttggagtataaaataatactggcaatgtcctacagcgacatactgaaaacattaattcaattcatgaacatagaaaaataacagaaaaaggaattgtattacttactttgttgctaaacatatatttgcacaaactgcaagggcttggatgttgaatgagagttcggtcctcatatttgttacttgagaaagcagtatttcagacatactggatcctatttcagatttgg

SEQ ID NO: 1340 - DNA, 561 bp, Homo sapiens
ctggtgcaaattcagaactgagggctctgtttgtgggactgggttagaggagtctgtggctttttgttcagaattaagcagaacactgcagtcagatcctgttacttacttcagtggaccgaaatctgtattctgtttgcgtacttgtaatatgtatattaagaagcaataactatttttcctcattaatagctgccttcaaggactgtttcagtgtgagtcagaatgtgaaaaaggaataaaaaatactgttgggctcaaactaaattcaaagaagtactttattgcaactcttttaagtgccttggatgagaagtgtcttaaattttcttcctttgaagctttaggcagagccataatggactaaaacattttgactaagtttttataccagcttaatagctgtagttttccctgcactgtgtcatcttttcaaggcatttgtctttgtaatattttccataaatttggactgtctatatcataactatacttgatagtttggctataagtgctcaatagcttgaagcccaagaagttggtatcgaaatttgttgtttg

SEQ ID NO: 1341 - DNA, 256 bp, Homo sapiens
caggaatcctacggcccctgaatattttggcatcttcaacctaccgcaactgtgtcaagaatgcctctcttatttctgcattgtccactggacgttttagtcatattcagacaccagttgtttcctccactcccagacttaccacatctgagagaaacctgacatgtgggcatacctcagtgatccttaatagaatggcccccgtgcttccaagtgtcctgaagctgccagtcagatctctaacatacttcagtgc

SEQ ID NO: 1342 - DNA, 602 bp, Homo sapiens
caagaagtcagtggccttcaagaagaccaagaaggaaatcaagaaggtagccacgccaaagaaggcatccaagcccaagaaggctgcctccaaagccccaaccaagaaacccaaagccaccccggtcaagaaggccaagaagaagctggctgccacgcccaagaaagccaaaaaacccaagactgtcaaagccaagccggtcaaggcatccaagcccaaaaaggccaaaccagtgaaacccaaagcaaagtccagtgccaagagggccggcaagaagaagtgacaatgaagtcttttcttgcggacactccctcctgtctcctattttctgtaaataattttctccttttttctctcttgatgctcaccaccaccttttgcccccttctgttctgactttataagagacaggatttggattcttcagaaattacagaataattcatttttccttaaccagttgtgcaaggacagcaacaaccaatctaatgatgagaatgtacttatattttgttttgctattaacctacttacggggttagggacttgcggggggggcttgtgtgttttgttggcttgtttgccatgaaggtagatgtggg

SEQ ID NO: 1343 - DNA, 590 bp, Homo sapiens
atcgcggacgggttgtgcctggaggtggaggggaagatggtcagtaggacagaaggtaacattgatgactcgctcattggtggaaatgcctccgctgaaggccccgagggcgaaggtaccgaaagcacagtaatcactggtgtcgatattgtcatgaaccatcacctgcaggaaacaagtttcacaaaagaagcctacaagaagtacatcaaagattacatgaaatcaatcaaagggaaacttgaagaacagagaccagaaagagtaaaaccttttatgacaggggctgcagaacaaatcaagcacatccttgctaatttcaaaaactaccagttctttattggtgaaaacatgaatccagatggcatggttgctctattggactaccgtgaggatggtgtgaccccatatatgattttctttaaggatggtttagaaatggaaaaatgttaacaaatgtggcaattattttggatctatcacctgtcatcataactggcttctgcttgtcatccacacaacaccaggacttaagacaaatgggactgatgtcatcttgagctcttcatttattttgactgtgatttatt

SEQ ID NO: 1344 - DNA, 582 bp, Homo sapiens
  misc_feature 548: n = A,T,C or G
aaaagttagaatctcaagagataccaaaagcacttaagagttaccaccacattttgcccaagttctaaggaaagttctgaaacttagtggtggtgtgtttgtactcagcaagctccagacagtctgagttgctcattccatgaacagaagcttgaaaatgcccttacagttgagatataaacgagggaagaggtgaagctttcaggaagccagagagcccctgccggtcaggtttcctgaggaaggcaggggtgctctatgctcatcagtcattcaagcttctcaggaaatgtgcccatcatgggaacagcagctatcttccaagcttaaaaattatgaatcccaggaagttaaagcccaaccagccaaccaccttcacatccttctcatactagtagagtcattcaaaacagcaagtggtgcttctgaggcagcctcaggaaggtctttgggtggctattctagaggtgaacatactggaaaggtttttacctaaagcattttcagttgaaatgaaaaaagaaggaaagctccaaaagtcagtttcnaattctttcagtgctgctcccaagaagtccgtgt

SEQ ID NO: 1345 - DNA, 382 bp, Homo sapiens
ctgaaccagagggcacacaatttgcatcactgaaactgtcctgggttagtcaatgaaataaaaatgtctaaccacatacacatggatatgatctttgtcggttagattattgataaagtcagtctcagacaagtttccaaactgtgctatttaactagatacaattgagaaattctcaaatgaaaattttatatagtgtcatatcaatcaaaagaaaataatgaaactaagaatacagatcactgttggaagagaaagcagtggtgatggtgtgggtactgcaggaggtggtggggccgtggcacactagaaaagttgggtcacgctgagtaggaagcatttgattttctctggtgcttttagctctggggccggtcaaagg

SEQ ID NO: 1346 - DNA, 505 bp, Homo sapiens
cctggaaagaagcccagcaaaaggttccagatgaagaagaaaatgaagagagtgacaacgaaaaggaaactgaaaagagtgactccgtaacagattctggaccaaccttcaactatcttcttgatatgcccctttggtatttaaccaaggaaaagaaagatgaactctgcaggctaagaaatgaaaaagaacaagagctggacacattaaaaagaaagagtccatcagatttgtggaaagaagacttggctacatttattgaagaattggaggctgttgaagccaaggaaaaacaagatgaacaagtcggacttcctgggaaaggggggaaggccaaggggaaaaaaacacaaatggctgaagttttgccttctccgcgtggtcaaagagtcattccacgaataaccatagaaatgaaagcagaggcagaaaagaaaaataaaaagaaaattaagaatgaaaatactgaaggaagccctcaagaagatggtgtggaactagaagg

SEQ ID NO: 1347 - DNA, 586 bp, Homo sapiens
aaaagcaaaaatgcaattctgtagatgaaaacagttatctcagagggtcaaccacacaatgtcatacagagacgctggtcttaagccatttttttccatattcatataatttcaaaacatgagaagtatcctacttgctgagaagtgccaaatgaccctaatattcaaaatatcttagaaatgctatcctttagttaacatacccttaaattttgtaacattgattttaccctggatttagtccatacacgtcaatgtacagacttatcaaagtacaatgctggaacaactagtgtttgtatttttggaatctagaaaataaaaacaatatagccatgatttcaaataggtgagtttccttatataacatttattcatatttattgtataagcatcatgattttttcttccaattaagttttagtgacttcctaaagacatttttaacaacattcctcaaaaataaacttacttagttttcagttttagttactagtgcctgcctataaaaggaccttaaatgatttaaccctaaagccagattcattcctatatatacccagtcagttgtctgcaaagaagtcct

SEQ ID NO: 1348 - DNA, 549 bp, Homo sapiens
ctgctttccccagaccagggggtccaatggctgcaatgtacccaaatggaatgttgcccccttaaacaccattttccctccaggaccaccttggtttctaggcactgtggttcttggcaggggctgtcttaggtaaaagggtagttgtggagctacagtctgaagaacatagcttgggctcaagttcaaatgagccatctttttcctttgcgtttttcttgactgaaggtgagatgttatttgtggcatgtgaactgtggcaggtgggaataatcctgcccttgagagaaaggatctccagcctcccagaagcctgctgtgctttcgtcccacagctttctgcccattgtttcttactagtttcttgaattgttcttgtggacttttcctcagggatacattggcctgcaggtcccagttcacatgtagtcccctgctcaccattggagaatcagctcactgctctctagaaacgtggcgttggtgaacggaccatgcttccgtagctctgacctgggcagcttggacctggtcatcctctactgccat

SEQ ID NO: 1349 - DNA, 515 bp, Homo sapiens
gttcaaaagagtcccacgaactggctgggtatacagaaatgtccagaggccggagagcgtttcagatcacatgtaccggatggcagttatggctatggtgatcaaagatgaccgtcttaacaaagaccgatgtgtacgcctagccctggttcatgatatggcagaatgcatcgttggggacatagcaccagcagataacatccccaaagaagaaaaacataggcgagaagaggaagctatgaagcagataacccagctcctaccagaggacctcagaaaggagctctatgaactttgggaagagtacgagacccaatctagtgcagaagccaaatttgtgaagcagctagaccaatgtgaaatgattcttcaagcatctgaatatgaagaccttgaacacaaacctgggagactgcaagacttctatgattccacagcaggaaaattcaatcaccctgagatagtccagcttgtttctgaacttgaggcagaaagaagcactaacatagctgcag

SEQ ID NO: 1350 - DNA, 476 bp, Homo sapiens
ccagtctactgagagctggaagtaattctctgccatttctagcctttcccggtactgagcagaaccttctatcagtcccttaaagtaatcattctttttcagactttcaaggaaactggcccagagtggtgaggcagtcacaagggatttcttgcagtcagaaaaatgtgggctacatttggagcataagatctcaaatccatgagccaatttcatgcccaattcatgggctcggtactggggatcagatggaggaggcagcctgtatccactccgccggtctggcacaaacctttgttgcaccaattgtgcatatagacatttagtgaatgtgaccgatgtcattattcgtgtttcaggcaagaatgtcttgaaaacacgacaagctcgcaggtcaatagggtctcgtaggtaaaatgcctggactgctgcagccaccaatctggggcgctgctttagcactgccacaatgccag

SEQ ID NO: 1351 - DNA, 609 bp, Homo sapiens
  misc_feature 595: n = A,T,C or G
ctggggccactgtcggcatcatgattggagtgctggttggggttgctctgatatagcagccctggtgtagtttcttcatttcaggaagactgacagttgttttgcttcttccttaaagcatttgcaacagctacagtctaaaattgcttctttaccaaggatatttacagaaaagactctgaccagagatcgagaccatcctagccaacatcgtgaaaccccatctctactaaaaatacaaaaatgagctgggcttggtggcgcgcacctgtagtcccagttactcgggaggctgaggcaggagaatcgcttgaacccgggaggtggagattgcagtgagcccagatcgcaccactgcactccagtctggcaacagagcaagactccatctcaaaaagaaaagaaaagaagactctgacctgtactcttgaatacaagtttctgataccactgcactgtctgagaatttccaaaactttaatgaactaactgacagcttcatgaaactgtccaccaagatcaagcagagaaaataattaatttcatgggactaaatgaactaatgaggataatattttcataattttttatttgnaattttgctgattc

SEQ ID NO: 1352 - DNA, 497 bp, Homo sapiens
cctcttgagtgtgacatcacaggttagaggccctgctgagctgctagcacagtgcagtggagaaatgttgcgctccgtcaggaagctgggctcttgccatgccagtagcttgcttacgaccttgggcaagtcactttttcctctctggggtcctgtgtccaaaaggcttaatgagccctttctaatggttctttgattgctttatgagttaggggctgtgaccctagccccagtgccctacaggaaggtgctgacctggacgcccgcaggaccacctgctaaatcaggcccacttggggagcaagccctgaagtgctttattaccttgcctctgagcttagtttccaggttagcctcttagaagcagctcacaaggccccacagtataattcccataggttagctaactactctcttacctgtgcaaaatgaagacaggtcactatccatccctgaagagaaactggggcatcccaggtctgcctctgctcctgtgg

SEQ ID NO: 1353 - DNA, 587 bp, Homo sapiens
cctgggctctctgcacctagtgaggtgtgaggctctcttgccacacagttcacactctcacttaactaagccagagttggtggcattattaaattatcactggtcttcttaatagtaaaaatggggaacccagagggcaggaaatttccattaccctatattggggctaaacttaaaagagtatatccactatcaagagcttagtacaaaggctggggtgaagttacattatacctggctttttaccataccagggagcccacctcaacatgactgtggaagaccaaaggatatacctaggttcagattataataaatcacccagcaccacctgaatgtattatccacaaagatatagcaataataaaggttatatatacatatatttatcttggtaacctgggggctaaaaacgtggaatacgataattcttctcaagaggtccatctgtaagaaagggacccaaaaggacagtgtttgtgttgcataaaatatgggtaaagtggagttgggaacaaagggtggtttctttagctctttccacatctctctttgataaggactgaaaccctgttgattcatgataa

SEQ ID NO: 1354 - DNA, 477 bp, Homo sapiens
ccaagctgatccgacagagaaaggtgaaatgtatagatgttgttcaggcttatatcaacagaatcaaggacgtgaacccaatgatcaatggaattgtcaagtacaggtttgaggaagcgatgaaggaggctcatgctgtagatcaaaagcttgcagagaagcaggaagatgaagccaccctggaaaataaatggcccttccttggggttcctttgacagtcaaggaagctttccagctacaaggaatgcccaattcttctggactcatgaaccgtcgtgatgccattgccaaaacagatgccactgtggtggcattactgaagggagctggtgccattcctcttggcataaccaactgtagtgagttgtgtatgtggtatgaatccagtaacaagatctatggccgatcaaacaacccatatgatttacagcatattgtaggtggaagttctggtggtgagggctgcacactggcag

SEQ ID NO: 1355 - DNA, 173 bp, Homo sapiens
aaactttagaaaataaaacttttaatacttaagagataacatgatgcaaacgttgcttgttggcctgactttccaggactaagaccctctgggaatcaatggggctcggtgacatggcgtaacctgctactggggtgtggtctcagacacaaaatcacactggatgttggtct

SEQ ID NO: 1356 - DNA, 523 bp, Homo sapiens
aaagagatgggggtcttactatgttggctaagctggtctcaaactccttgcctcaggtaatccttctgcctcagcctcccaaagtgctgagattacaggcatgagccaccatgcccgacttccctttgtgtaaaatgagataatatgtatgtcacagaattgttttaaggatgataaaggactaagtgagataatgtaggtgaagtttagtatgatgcctggctcatagttaagtgctgaattatgatagtaatcaatatctactcctaacctctttcttcacagattttaagcttctgtctttctagggggttaagagtcataaaccaaaattacactttcctctgctaggtttcctccctttcctcttcttgacagtctgatgggaaacaaaggcacacataagagcctagttccaagtagtcaagagcctgagaggaagggatatggagagtaatccttcatatctccaggagtgcctgtgaagaagctgaggaatgggactgggaaagcgcacaaaata

SEQ ID NO: 1357 - DNA, 429 bp, Homo sapiens
aaaaatttttgtttggttatatcaaaatagttacaggcactaaagttagtaaagaaaagtttaccatctgaaaaagctggattttctttaagaggttgattataaagttttctaaatttatcagtacctaagtaagatgtagcgctttgaatatgaaatcataggtgaagacatgggtgaacttacttgcataccaagttgatacttgaataaccatctgaaagtggtacttgatcatttttaccattatttttaggatgtgtatttcatttatttatggcccaccagtctcccccaaattagtacagaaatatccatgacaaaattacttacgtatgtttgtacttggttttacagctcctttgaaaactctgtgtttggaatatctctaaaaacatagaaaacactacagtggtttagaaattacta

SEQ ID NO: 1358 - DNA, 420 bp, Homo sapiens
gtggccgcaaagaagacgaaaaagtcgctggagtcgatcaactctaggctccaactcgttatgaaaagtgggaagtacgtcctggggtacaagcagactctgaagatgatcagacaaggcaaagcgaaattggtcattctcgctaacaactgcccagctttgaggaaatctgaaatagagtactatgccatgttggctaaaactggtgtccatcactacagtggcaataatattgaactgggcacagcatgcggaaaatactacagagtgtgcacactggctatcattgatccaggtgactctgacatcattagaagcatgccagaacagactggtgaaaagtaaaccttttcacctacaaaatttcacctgcaaaccttaaacctgcaaaattttcctttaataaaatttgcttgtttt

SEQ ID NO: 1359 - DNA, 519 bp, Homo sapiens
tgggcatcaaggtagacaagggcgtggtccccctggcagggacaaatggcgagactaccacccaagggttggatgggctgtctgagcgctgtgcccagtacaagaaggacggagctgacttcgccaagtggcgttgtgtgctgaagattggggaacacaccccctcagccctcgccatcatggaaaatgccaatgttctggcccgttatgccagtatctgccagcagaatggcattgtgcccatcgtggagcctgagatcctccctgatggggaccatgacttgaagcgctgccagtatgtgaccgagaaggtgctggctgctgtctacaaggctctgagtgaccaccacatctacctggaaggcaccttgctgaagcccaacatggtcaccccaggccatgcttgcactcagaagttttctcatgaggagattgccatggcgaccgtcacagcgctgcgccgcacagtgccccccgctgtcaccgggatcaccttcctgtctggaggccagagtgagg

SEQ ID NO: 1360 - DNA, 571 bp, Homo sapiens
ctgagcctgtccgaagccctgcagagagagaagatcttctttgagaaccacccatatttcagggatctgctggaggaaggaaaggccacggttccctgcctggcagaaaaacttaccagcgagctcatcacacatatctgcaaatctctgcccctgttagaaaatcaaatcaaggagactcaccagagaataacagaggagctacaaaagtatggtgtcgacataccggaagacgaaaatgaaaaaatgttcttcctgatagataaaattaatgcctttaatcaggacatcactgctctcatgcaaggagaggaaactgtaggggaggaagacattcggctgtttaccagactccgacacgagttccacaaatggagtacaataattgaaaacaattttcaagaaggccataaaattttgagtagaaaaatccagaaatttgaaaatcagtatcgtggtagagagctgccaggctttgtgaattacaggatatttgagacaatcgtgaaacagcaaatcaaggcactggaagagccggctgtggatatgctacacaccgtgacggatatgg

SEQ ID NO: 1361 - DNA, 520 bp, Homo sapiens
ctgttccttttcacctaactgttcagtcattctggttttcaagcagtgctttatctcatgtccttgaatatagttgtgtaactttattttttaggtaataattagaacagttcccttcagaggctgcatttgccttcttctgccacctaaatattacttcccttcaaatctgcctttgaatcatcatttttaaaaaaaaaattaacatgtttttgttgtaattatcttctggggtttcaattcctcagaaacaacttttttcacaacggaaaggaaagaacactagtgttctttcagtaaagtacaaagtgtttattttacaaaagagtaggtactcttgagagcaattcaaatcatgctgacaaggatactgatagaaaaagtgatttcttcttattataaagtacatttaaagttcaaggactaaccttatttatttgggaaaggggaggaggaaggaaatgatatggtacccagacactgggctaggctgcaactttatctcatttaatactcccag

SEQ ID NO: 1362 - DNA, 535 bp, Homo sapiens
ggtacatgtatatatttgtcctgcattatgttttttacttgatataaatgtatttttactgtgatagtccaagtgccctggggggcaggtgtgctctatgtggttcttcttccattggagagctggcgtagagatctgcagtgttcacaaggatgttggtttggagatgtctgctgctaggacctggggtgtgtgactcagtccatatgagagggacatctgggtggaggagtaaattcctgtgctctgaaatgccacttggtagctctggacaatgaaggacaattgactcaagggtgcctggcttctgctgctgctgggaaaaaattcagtttatagcattcctgcacctcccaaagtagataacctggaggtcattcagttaacaactgtccctgaggactcagttttgggggaggggttatctgggagaagctttagcctgttctgagccattaggagacattagtgaattggagcactggagaatcctacaaatggcctatgtctcagaagagctgggacctccttccag

SEQ ID NO: 1363 - DNA, 373 bp, Homo sapiens
aaaaaaaaagagtgtattctatcaggattctgactagagtgctctagagtatgacataggatagggaatgtcttaacaagcttcaaaattctaggaacaatgaaactaggaaaaaagctttgaaaaatgccagggattcaactgcctccctggcctttccctgccaatcaatgtgccccagcagccaatttacacagcactgtgtgcaggcttgtaaatagaccttccagttctgctataatcaagaccttattgtccataactcaatttagagaaggtttagctgtctaccaactcttgtgcagagtttctgtgaagttttgttttgggttgcaagaatctggaaaacaaatgcagacatttttgaggaaga

SEQ ID NO: 1364 - DNA, 454 bp, Homo sapiens
tgcattctcaaccgcttggtccagtttgtaaaagacagaatttcggtggtgcaggccctggttctgacccaacagtatcaccaactcaaatcaatagatccagaagaagtagaatcgcgtgaataaaagattttattcagtttccagaaagaggggggaatgaaagaccccaccataaggcttagcaagctagctgcagtaacgccattttgcaaggcatgaaaaagtaccagagctgagttctcaaaagtcacaaggaagtttagttaaagaataaggctgaacaaaactgggacaggggccaaacaggatatctgtggtcgagtacctgggccccggctcagggccaagaacagatggtactcagataaagcgaaactagcaacagtttctggaaagtcccacctcagtttcaagttccccaaaagaccgggaaaaaccccaagccttattt

SEQ ID NO: 1365 - DNA, 503 bp, Homo sapiens
cctcgatgtctaaatgagcatggtaaaggatggtgcctgctggggtctcgtagatacctcgggacttcattccaatgaagcggttctccacgatgtcaatacggcccacgccatgcttgtccgcgacttcgttcaggtacatgaagagctccaaggaggtctggtgggtggtgccatccttgacgttggtcaccttcacagggaccccttttttgaactcgatctcgagaatgtcaggggtgttgggggctttggctgggtcctgggtcttcgtgtagagacctggaggcgcttggttcttggggttctccaggattccagcctcgtagctgatgtgcatgaggttctcatccatgctccacgggttcttgggagtgaccgggatgggaatcccgtgttgctttgcgtactccatcaggtcattgcggcccttgaaccggttgtagaattcaggcatcctccagagagcaatgacctttatctggggggccagtgagtagcag

SEQ ID NO: 1366 - DNA, 528 bp, Homo sapiens
aaaaaatctggtgcaacacatattgctaagtttcaaagattctcatttccaatgttcacctggaaagcagatggctcttgatggctgttttgcggcagtgataaaagcaactacaagcaagtttaagtaaaagtgctcaaagggcaaatgagaaaacaggtgtgcagggggagggggctgaagagttgagcaatgtttcctttattcttctcagctttttcagacccaagacaagttcttgaggacacacatcaaatgctgtagtcctttcttatctatagtcaaaacaaaacaagtgattaaaaaaaggttcctcttcctttctgtactctcaataaaatgcatagcacagtaagaaggtactgagatgtgccatcttgggagaaattaaaattgagacatgaagtgaggccgtgcactgtcaagtcgccgggttaggatttcacagccagtgtctgtgaccaggagggtgtgctcaaactgagcagaccgctttccgtctcttgtcaccgcagtccaaccatctgg

SEQ ID NO: 1367 - DNA, 135 bp, Homo sapiens
cctgccccctctcgagtccaccctccgggccttctgcccctgatcgcttggttttccttgcagtcgcctgctgctgtcgtcgggaggaaagatgaatgggagggctgattttcgagagccgaatgcagaggttcc

SEQ ID NO: 1368 - DNA, 437 bp, Homo sapiens
gtgattatcctgaaccatccaggccaaataagcgccggctatgcccctgtattggattgccacacggctcacattgcatgcaagtttgctgagctgaaggaaaagattgatcgccgttctggtaaaaagctggaagatggccctaaattcttgaagtctggtgatgctgccattgttgatatggttcctggcaagcccatgtgtgttgagagcttctcagactatccacctttgggtcgctttgctgttcgtgatatgagacagacagttgcggtgggtgtcatcaaagcagtggacaagaaggctgctggagctggcaaggtcaccaagtctgcccagaaagctcagaaggctaaatgaatattatccctaatacctgccaccccactcttaatcagtggtggaagaacggtctcagaactgtttgtttcaattgg

SEQ ID NO: 1369 - DNA, 469 bp, Homo sapiens
aaagggattattaaaataacatttacaagactctgaacaattcttgaactcttattaaaaccacaaagaaagaacaattctttatttatgaatttcataaaggactcaatgtgcaactgacatctgctagtgatgatctggtaatatacaacctgtccagtagccgaacagtttgtttttattgtgttttctaaccgtaagagatcattaaaggcaaagcctatatgacgctgtacacacaaaaaaatggtcaccgtgggccatactaccaatgaaatggtaggtaaacaaatcttctggtcaagagaaaaaaaaagaaatagcactctgcatgctttgctctacaagatgaatttccctagaaagaatccaatgaaggccgggcatagtggctcactcctgtaatcccagcactttggaggccgaggcgggtagatcacctgaggttaggagttcaagaccagcctgg

SEQ ID NO: 1370 - DNA, 541 bp, Homo sapiens
aaaatggcctgcaaggaggacgtgttgaagctttgcccaaacataaaaaagaaggtggacgtggtgatctgcctgagcacgaccgtgcgcaatgacactctgcaggaagccaaggagcacagggtgtccctgaagtgccgcaggcagctccgtgtggaggagctggagatgacggaggacatccgcttggagccagatctatacgaagcctgcaagagtgacatcaaaaacttctgttccgctgtgcaatatggcaacgctcagattatcgaatgtctgaaagaaaacaagaagcagctaagcacccgctgccaccaaaaagtatttaagctgcaggagacagagatgatggacccagagctagactacaccctcatgagggtctgcaagcagatgataaagaggttctgtccggaagcagattctaaaaccatgttgcagtgcttgaagcaaaataaaaacagtgaattgatggatcccaaatgcaaacagatgataaccaagcgccagatcacccagaacacagattaccgcttaaacc

SEQ ID NO: 1371 - DNA, 472 bp, Homo sapiens
aaattggcagagttataacaaaggagagcctcaaatattagacaattgcagtgcggctttctgggcacaggtgtcactgctctgccacctatcactattctttttctgttcagtttttctctcagatgtttgctgggaaattaacactggaactgacccttttctggcagtgaatgtaagctctagctcccccatctactataaagaaatgtcttcgagatgtagaaataaggaatattctgaaaataaaaattatacagtagtaaagataattcagaaagaaaaagctacctgttagaatttccagtctaaatggcacagggtagttacggagaaaaggggatggagaaggagaaactatgactaaagatgagaggtatgaacgagttgtcaggttcctatgggcttaagctaggacaatcaggccctaaactccaaatttggataaaatatctctttgcattcttcttgg

SEQ ID NO: 1372 - DNA, 492 bp, Homo sapiens
cctaaaaagatctttgttactcatctagaattatttggtataacagtattttcccatggaggaagacttggatttcaggcattaaacaacgcagaaaaaaatctcaaggcatcacagggagagggagataacttttgactctggtttcccgtgtttcaggccaggaagagcaaggggagaaaaatatttgtccatgggaacaagtaatcatgctctaaaggacaatttcattcgaatccattcatttccttttcatgcaaaatttcaaagataaagcaacataaaatatggggccacataaaagggagaaggtcttcaaggagaatttgtgcctttaagtttttactggtacaacagtctttcagcctggaggtactcaaagacgaatcatgaaaaagaaaaaaaactttatttcaaacaggttcagtgatatatgtgtgtgccacaaccagcctttgctgtagcacacacatatttcaaacaggttcagtg

SEQ ID NO: 1373 - DNA, 482 bp, Homo sapiens
  misc_feature 396: n = A,T,C or G
ctgaaatgcatttcagaaataggaggtttcgtccagcaccctctgcagccttggtgcctgtagctctggacttccctgggcctttccctgtgggagggccctgtagaccacatcagggtggggtgggggtcacttggcaaaaagggccgaggtctggtgatgtggttcccaggatctggaacctctcccacccctcctgcagttggactgaattcttccctttcatccgaagaaacccacttgctgtttccagccgctgaatctgctgagtgtgcagcctgcatcacctgctgtatgccgatcatctcagaaagggctgtgtagagtagggccctgttctccttaggatgttgcttcttgattttttttttttttttaggggtgggtcagggktkntgacacaccagcccaggtgagagctgctgcgggtcacctcatatttatttatcccttcttgcctgtgaggactgcggcttttcgct

SEQ ID NO: 1374 - DNA, 361 bp, Homo sapiens
cctggagttcaagaccaccttggcgaacacggtgaaaccccgtctctacaaaaaatacaaaaattagccaggcgtggtggcacgtgcctgtagtcccagctacttgggaggctaagtcaggagaattgcttgaacttgggagatggaggttgcagtgagccaagattgcaccactgcattccaacctgggtgatgaagtgagactctccaaaaaaaaaaagaaattattaatccctgcctgtgctctacatawcctcatgggcatyattggatarctcawagggcccttgattctggcaaggcaaayaaagccagaatgagaaattaccatmttctactaragaaaaccaakagaaaaatt

SEQ ID NO: 1375 - DNA, 449 bp, Homo sapiens
aaataaggcttggggtttttcccggtcttttggggaacttgaaactgaggtgggactttccagaaactgttgctagtttcgctttatctgagtaccatctgttcttggccctgagccggggcccaggtgctcgaccacagatatcctgtttggcccctgtcccagttttgttcagccttattctttaactaaactttcttgtgacttttgagaactcagctctggtactttttcatgccttgcaaaatggcgttactgcagctagcttgctaagccttatggtggggtctttcattcccccctctttctggaaactgaataaaatcttttattcacgcgattctacttcttctggatctattgatttgagttggtgatactgttgggtcagaaccagggcctgcaccaccgaaattctgtcttttacaaactggaccaagcggttgaga

SEQ ID NO: 1376 - DNA, 513 bp, Homo sapiens
ctgtggtggctcatgcctgtaatcccagcactttgggaggccgaggagggtggatcactaggtcaggagtttgagaccagcctgaccaacatggtgaaaccccgtctctactaaaaatacaaaaatcacccaggtgtggtggcacatgcctgtaatcccagatacttaggaggctgaggcaggagaatcgcttgaacccaggagacggaggttgcggtgagagccgagatcgtgctactgcactccagcctgggcaacagagcaagactctgtctccaaaaaaaaaaaggaaagcagaagggggcattttcctgtcttcaaaatacaacctcctgctaagactagcaagtcagcagaaactcattgcatttgggcttctggttactaaatgaattaagagacaccgagttccatccttagatgtccacatagatcccattgatcaaataatccagtcttgagtaacgtttcctgcggagtgattccgagaggattctacccaggaggacgagg

SEQ ID NO: 1377 - DNA, 444 bp, Homo sapiens
aaagagatgggggtcttactatgttggctaagctggtctcaaactccttgcctcaggtaatccttctgcctcagcctcccaaagtgctgagattacaggcatgagccaccatgcccgacttccctttgtgtaaaatgagataatatgtatgtcacagaattgttttaaggatgataaaggactaagtgagataatgtaggtgaagtttagtatgatgcctggctcatagttaagtgctgaattatgatagtaatcaatatctactcctaacctctttcttcacagattttaagcttctgtctttctagggggttaagagtcataaaccaaaattacactttcctctgctaggtttcctccctttcctcttcttgacagtctgatgggaaacaaaggcacacataagagcctagttccaagtagtcaagagcctgagaggaaggg

SEQ ID NO: 1378 - DNA, 432 bp, Homo sapiens
ctgaaccctcgtggagccattcatacaggtccctaattaaggaacaagtgattatgctacctttgcacggttagggtaccgcggccgttaaacatgtgtcactgggcaggcggtgcctctaatactggtgatgctagaggtgatgtttttggtaaacaggcggggtaagatttgccgagttccttttactttttttaacctttccttatgagcatgcctgtgttgggttgacagtgagggtaataatgacttgttggttgattgtagatattgggctgttaattgtcagttcagtgttttaatctgacgcaggcttatgcggaggagaatgttttcatgttacttatactaacattagttcttctatagggtgatagattggtccaattgggtgtgaggagttcagttatatgtttgggattttttaggtag

SEQ ID NO: 1379 - DNA, 482 bp, Homo sapiens
aaaaagcaatcctcaaactctctagccacagcagtaattaagattaaggtctgtcagtgggctgatcccctccaggtagcctccctcactccaagagaagatgtagagaaatatggatgacacatgcttgcattgtttttgtgtcaaaacacacacacacccacacacacacacaatataaggcagcccaaaggtctgtggcagaaaacactgcaaatgactcagtgatacactacatttgcaatctctcatttatacaaaaaaagaaacaagtttccagtttgttttcaacaaaaacaacaaagaaaaaagggatggacaaaaaggcatttatacaaatctagggtgaggaatacaaagaaacttgcttttaataataaaaaaagattaaagagataaataaaaaaaactggttacagttaagaacataatttaacaacagatgaccataccctttgaggaaagctccaacaacctatttt

SEQ ID NO: 1380 - DNA, 226 bp, Homo sapiens
ggccgggagagggctactgtggcaaatggggatgtgagaccactggacaggcatactggaagtcatcatcattatgggacctaatttcccttaagcgagggaacactcctaaggatcagggcccctgttatgattcctcggtctccagtggcgtccagggtgccacaccggggggtcgatgcaaccccctagtcttagaattcactgacgcgggtaaaaaggccag

SEQ ID NO: 1381 - DNA, 452 bp, Homo sapiens
ctgccaaggagaccctgttatgctgtggggactggctggggcatggcaggcggctctggcttcccacccttctgttctgagatgggggtggtgggcagtatctcatctttgggttccacaatgctcacgtggtcaggcaggggcttcttagggccaatcttaccagttgggtcccagggcagcatgatcttcaccttgatgcccagcacaccctgtctgagcaacacgtggcgcacagcagtgtcaacgtagtagttaacagggtctccgctgtggatcatcaggccatccacaaacttcatggatttagccctctgtcctcggagtttcccagacaccacaacctcgcagcctttggccccactctccatgatgaaccgcagcacaccatagcaggccctccgcacagcaagccctcctaggagtttgtaacgcagagactctgcctgggc

SEQ ID NO: 1382 - DNA, 565 bp, Homo sapiens
aaacaagtcagtaaaataaacggtagtacccgcttttaggcatacagattgtaaaactgaagttcacttttctttgatcggttttgcgtagcaacagagaagtataaatcaaacaggaatcaaaatggctaaatatgcaagaaatcgttattcacagtgacatggctacatagaatgcattattctatgcatattctttccgttggttgaatttcaagataaaaagcacttgttttctacaggttcacaaaacagcgtaataacaagaacgatcaaggagaatgtaatgtaggcgttagttgagattaacaaactatggcccaatgcttatgtccactgcagagtacttccaaatccaaacaatggttacagaaaccatttcccatctttcctaacacagagaaaaagtcttgcctgctttccaagaaaccaattctttataacaacaatctttcttttcaattaacgtccataggagtatcacatgtagtccatcttttatagccaaatttgatgtcactacaaaagaaagcaaattggacgatagtcacatgtattagcatct

SEQ ID NO: 1383 - DNA, 501 bp, Homo sapiens
ctgcagcctgggactgaccgggaggctctgattatttacccaccacaggtaggttgtgttctgaatctcaggttcacaggttaaggctacagcatcctcatcctccacggggttggagttgttgctggtgatgaagggtttgggtggctctgcatagactgtgatcgtcgtgactgtggtcctattgaggccagtgtctgagttatgggcttggcacgtataggatccactattattcacagtgatgttggggataaagagctcttgggtggattgctggaaagtcccattgacaaaccaagagtactgtgcaggtgggttagaggctgcgtggcaggagaggttcagattttcccctgatctgtaagatgtgtttagaggggaaatggtgggggcatccgggccatagaggacattcaggatgactgaatcactgcgcctggcactcactgggttctgggtttcacatttgtagcttgctgtgtcatttcttgkgacatt

SEQ ID NO: 1384 - DNA, 516 bp, Homo sapiens
aaagaatcagcaaaatttcaaataaaaaattatgaaaatattatcctcattagttcatttagtcccatgaaattaattattttctctgcttgatcttggtggacagtttcatgaagctgtcagttagttcattaaagttttggaaattctcagacagtgcagtggtatcagaaacttgtattcaagagtacaggtcagagtcttcttttcttttctttttgagatggagtcttgctctgttgccagactggagtgcagtggtgcgatctgggctcactgcaatctccacctcccgggttcaagcgattctcctgcctcagcctcccgagtaactgggactacaggtgcgcgccaccaagcccagctcatttttgtatttttagtagagatggggtttcacgatgttggctaggatggtctcgatctctggtcagagtcttttctgtaaatatccttggtaaagaagcaattttagactgtagctgttgcaaatgctttaaggaagaagcaaaacaa

SEQ ID NO: 1385 - DNA, 494 bp, Homo sapiens; identical to SEQ ID NO: 379

SEQ ID NO: 1386 - DNA, 528 bp, Homo sapiens
ccttggtttccaacgccggcgaggatgaggcccagtcccacactccctcgcaggcacccttgctaagatgtcctcctgggtgaccaaaacggtggtaacatagccaaggttacttttacttgggtaggatgactgcagaaggaatggctacacagagcttccagacctttccatgcgttgtgctctccagaggatgcgccaggtgtatcagatttgcatgcacaaagacaggtgtgcgccccacccaccctgggctgggcagcaagaggtctgctcacctactgcaccagacttcctagcctccttccacactccgaatcttcaagcaggatgaaaagagaccacagaaactgaagcaagactaggatgctgcaaagaaagatgctctgatacacaaaagccaaaacataagacaaggagggaagagtaaaatgagggagacagacaggaagttaaactatgcagttacactgccgatttagaaagatgttaagacacacactagatacaaatgaaacccatcctgct

SEQ ID NO: 1387 - DNA, 517 bp, Homo sapiens
aaatatgctcaatttgaaaaaacaattccagctcttgtaaggattatgaacatctagctgttgcaacaaatggccctgaaaacacacaaatctaactcaggttttatttctttgcagtttcttggacattgatattcaaaggtcaaatatttaatctgaaaatctaggtaattaaaaacgtaagagatgaattgcattccttcctgccctccacccagataaattggatgtgttatctatatgggaattcatgatttaatatgtgattattataagtctgaacaacttacttggttataggatatcttcataacttttttcctttagtgtcttcttaaaagttagtaatacacaagcaaccaaaggaaaaaatagataaattggacttcatcaaaattaaaaatgttcatacttcaaaggacactgtcaggaaagtgaaggataaaagataaccctcaaaatgagggaaaatatttgtaaaacatgtatcttatgaggatcagcagaatatatctag

SEQ ID NO: 1388 - DNA, 483 bp, Homo sapiens; identical to SEQ ID NO: 286

SEQ ID NO: 1389 - DNA, 519 bp, Homo sapiens
cgaccctgatatccaccattatgggccctctgatagtacttttattaatcctactcctcggaccctgcattctcaaccgcttggtccagtttgtaaaagacagaatttcggtggtgcaggccctggttctgacccaacagtatcaccaactcaaatcaatagatccagaagaagtagaatcgcgtgaataaaagattttattcagtttccagaaagaggggggaatgaaagaccccaccataaggcttagcaagctagctgcagtaacgccattttgcaaggcatgaaaaagtaccagagctgagttctcaaaagtcacaaggaagtttagttaaagaataaggctgaacaaaactgggacaggggccaaacaggatatctgtggtcgagcacctgggccccggctcagggccaagaacagatggtactcagataaagcgaaactagcaacagtttctggaaagtcccacctcagtttcaagttccccaaaagaccgggaaaaaccccaagccttattt

SEQ ID NO: 1390 - DNA, 154 bp, Homo sapiens
cctgtgagcttgtatgtacccttcggcttcagaataccaagcctttagtgtttcagagggatgagagaaagaaatcccattttttgatgcagaggattttgttccccatggctgggggttatggagtgatgggtgacgatggttctattgatta

SEQ ID NO: 1391 - DNA, 502 bp, Homo sapiens
ttttattttaatacattatttttcacagcatgggctggacatgaatggaatgtatgaaagtttgaagaccttttatttatccatttcttttttttcccagataaaatttacattttacattttgttttcttgcatgtatactgtaaaaattacttctgtttggtggtgaaattaaaacttaatggtgttggtttctctgaacaattagtattttggtgtagtagtgttgtctagccaaaaatctcgtgaatttacttttaatgaaaagaattgccaaatgagtgaatgggaagattttgtgggtgccttatttgcattttattaccataacctgacttttgttttctaggctttttctggaactgttatagaaaaagaatttgtatcaccttccttaacaccacccccagccattgctcatcccgcactacccactattccagaacgaaaggaagttctgttggaagcatctgaagaaactggaaagagggtttcaaagttt

SEQ ID NO: 1392 - DNA, 540 bp, Homo sapiens
  misc_feature 455: n = A,T,C or G
tttttatcaactgtgggaaaccaaacacaaagctgataacctttcttaaaaacgacccagtcacagtaaagaagacacaagacggccgggcgtggtagctcacgcctgtaatcccagcactttgggaggccgaggcgggcggatcacaagggcaggagatcgagaccatcctggttaacacggtgaaaccccgactctactaaaactacaaaaaaattagctgggcgtggtggcgggcgcctgtagtcccagctactcaggaggctgaggcaggagaagtgtgaacccaggaggcggagcttgcagtgagccgagatcacaccactgcactccatccagcctgggtgacagggtgagactctgtctcaaaaaaaaaaaaaaaaggagacacaagacttactgcaaaaatatttttccaaggatttaggaaagaaaaattgccttgtattctcaangtcaggtaactcaaagcaaaaaagtgatccaaatgtagagtatgagtttgcactccaaaaatttgacattactgkaaattatctc

SEQ ID NO: 1393 - DNA, 500 bp, Homo sapiens
gcagaccaggcggcccgagaggcagccacaaaaacagttccagaagcctctacactccttatagaggactcgaccccgtacacgcctgcctatctccattacaccgaaacagatctaaaaagattgcgagaactgggggccacctataatcagataaaaggatattgggtcctacaaggcaagccggtgatgcccgatcagtttgtgtttgaattattagactcccttcatagactcacccatctcagccctcaaaagatgaaggcgctccttgacagagaagaaagcccctactacatgttaaacagggacagaactcttcagtatgtggcagaatcctgcacagtctgtgctcaagtaaatgctagtaaagccaaaatcggggcaggggtacgagtacgcggacatcgaccaggtacccattgggaaattgacttcactgaagttaaaccagggctgtacgggtacaagtacctcctggtgttcgtagacaccttctc

SEQ ID NO: 1394 - DNA, 493 bp, Homo sapiens
gtttgagagactgtttaacaggtccccatggttcacgaccctgatatccaccattatgggccctctgatagtacttttattaatcctactcctcggaccctgcattctcaaccgcttggtccagtttgtaaaagacagaatttcggtggtgcaggccctggttctgacccaacagtatcaccaactcaaatcaatagatccagaagaagtagaatcgcgtgaataaaagattttattcagtttccagaaagaggggggaatgaaagaccccaccataaggcttagcaagctagctgcagtaacgccattttgcaaggcatgaaaaagtaccagagctgagttctcaaaagtcacaaagaagtttagttaaagaataaggctgaacaaaactgggacaggggccaaacaggatatctgtggtcgagcacctgggccccggctcagggccaagaacagatggtactcagataaagcgaaactagcaacagtttct

SEQ ID NO: 1395 - DNA, 474 bp, Homo sapiens
gtgaaattgacctgcccgtgaagaggcgggcatgacacagcaagacgagaagaccctatggagctttaatttattaatgcaaacagtacctaacaaacccacaggtcctaaactaccaaacctgcattaaaaatttcggttggggcgacctcggagcagaacccaacctccgagcagtacatgctaagacttcaccagtcaaagcgaactactacactcaattgatccaataacttgaccaacggaacaagttaccctagggataacagcgcaatcctattctagagtccatatcaacaatagggtttacgacctcgatgttggatcaggacatcccgatggtgcagccgctattaaaggttcgtttgttcaacgattaaagtcctacgtgatctgagttcagaccggagtaatccaggtcggtttctatctacttcaaattcctccctgtacgaaaggacaagagaaataagg

SEQ ID NO: 1396 - DNA, 180 bp, Homo sapiens
ctggaacgtcagcccagcgagccgaactgatcgcactcacccaagccctgaaaatggcagaaggtaagaagctaaatgtttacactgatagccgctatgccttcgctacggcccatgttcatggggaaatatataggagacgggggttgctgacctcagaaggcaaggaaatcaagaaca

SEQ ID NO: 1397 - DNA, 559 bp, Homo sapiens
  misc_feature 527: n = A,T,C or G
aaatcatatattggtgacatacttatcacgaggacaagggggaaaaaaagtctagatttaccatgcaggagagatttattactctacttgcctttgataacctgattacatctagttgtttagcagtttagtattgtgttaaactgtttttacaacagagttttttctttttttttaattaaacccagtaagatgtacagaagacaatgaggcagtaaaaagtactgcttccaacagacagaggtgaaaggtcaaatgaggggccacagcaaagaggtcactagcagccacagccttctctctggggttggggttcactggttagccggcctccctgcggggctgaaggtttgtgttgtacaccagactcagcagcattcagatccaagcttccatcctgaatgttctgatagattttcttggcagcctcaaggaaggcatcttctacattctctcccgtttttgcactcgcttcgaggaacaataagccattttcttcagcaaactgtttggcttcttcatatgtnacatctctctgtgcctccaaatctgctttatt

SEQ ID NO: 1398 - DNA, 606 bp, Homo sapiens
cggcagcacctccttgattctcagttttgctggaggccgcaaccaggcccgcgccgccaccatgtttcgaaatcagtatgacaatgatgtcactgtttggagcccccaggattcatcaaattgaatatgcaatggaagctgttaaacaaggttcagccacagttggtctgaaatcaaaaactcatgcagttttggttgcattgaaaagggcgcaatcagagcttgcagctcatcagaaaaaaattctccatgttgacaaccatattggtatctcaattgcggggcttactgctgatgctagactgttatgtaattttatgcgtcaggagtgtttggattccagatttgtattcgatagaccactgcctgtgtctcgtcttgtatctctaattggaagcaagacccagataccaacacaacgatatggccggagaccatatggtgttggtctccttattgctggttatgatgatatgggccctcacattttccaaacctgtccatctgctaactattttgactgcagagccatgtccattggagcccgttcccaatcagctcgtacttacttggagagacatatgtctgaattatggagtgtaattt

SEQ ID NO: 1399 - DNA, 376 bp, Homo sapiens
ttgagataaccatcagtttattaaagagggaaatggatcagacaatggctgccaatgctcasaagaataaattcttgattgatgggtttccaagaaatcaagacaaccttcaaggatggaacaagaccatggatgggaaggcagatgtatctttcgttctcttttttgactgtaataatgagatttgtattgaacgatgtcttgagaggggaaagagtagtggtaggagtgatgacaacagagagagcttggaaaagagaattcagacctaccttcartcaacaaagccaattattgacttatatgaagaaatggggaaagtcaagaaaatakatgcttctaaatctgttgatgaagtttttgatgaagttgtgca

SEQ ID NO: 1400 - DNA, 484 bp, Homo sapiens
taaagacatgccaatttgaaaaggcatcaaagtaaaaaaataaaagcaaatgctaaaaactactttacaataaaaaaattaaataatcggcaggttaaatgaatgtaaaatgaggaatgtacagtgaaaaacaaactaatataaagcattccagttgataaaaacctcctcaggcttatggtttgttttccaaggaaattatgtttcaatgtaaagtttgaaatactccagacatacattccatgtaggttttgggtgccaatgttaaaatttcaaattttgcatgcaaggcttagcaaagaaacactggcagaattccagcatttgcaaaattctaagttttggtgaatattgtaaatattacaattggtattagaaagccatgatgaatccagaattaagagaaaacccatttcataaatattttgtttgattaaaaaataccaggcttaccatgttctaaataattcaagaaaatatcttt

SEQ ID NO: 1401 - DNA, 473 bp, Homo sapiens
ctgaacaggaatcaaagcctcgggaaatccaagggctgctgtcaggaaaatacagacaacttccccgacgttggacgagatgaggtagcggatgaactgtttcatgttgttgtagattgcccgcccctcctcaacggcagccacaatggtggagaagttgtcatccgccaggaccatctcagaggcggttttagccaccgcagtgccagagcccatagcaatgccaatctcggctttcttcagagcaggagcatcgttcacgccatcgccagtcatagctgtaatctcatcaaaagactgaagaaattctacgattttagacttgtgggagggttcaactcgagcaaaacagcgggcgttcaggcaggcgtctcgctgggcggaggggttgagttcatcaaactcccggcctgtgaaagcttttgacgtcacgtcctcatcctgcccgaagatgccgatgcggcgacagatgg

SEQ ID NO: 1402 - DNA, 545 bp, Homo sapiens
  misc_feature 461: n = A,T,C or G
aaaacatccctaactgatcgaatatatcagtaatttcagaatcagatgcatcctttcataagaagtgagaggactctgacagccataacaggagtgccgcttcatggtgcgaagtgaacactgtagtcttgttgttttcccaaagagaactccgtatgttctcttaggttgagtaacccactctgaattctggttacatgtgtttttctctccctccttaaataaagagaggggttaaacatgccctctaaaagtaggtggttttgaagagaataaattcatcagataacctcaagtcacatgagaatcttagtccatttacattgccttggctagtaaaagccatctatgtatatgtcttacctcatctcctaaaaggcagagtacaaagtaagccatgtatctcaggaaggtaacttcattttgtctatttgctgttgattgtaccaagggatggaagnagtaaatatagctcaggtagcactttatactcaggcagatctcagccctctactgagtcccttagccaagcagtttctttcaag

SEQ ID NO: 1403 - DNA, 435 bp, Homo sapiens
ccagccagatcaaggatgtagtatctcatagttcccaggtgatatttttcttattagaaaaatattataactcatttgttgtttgacacttatagattgaaatttcctaatttattctaaattttaagtggttctttggttccagtgctttatgttgttgttgtttttggatggtgttacatattatatgttctagaaacatgtaatcctaaatttaccctcttgaatataatccctggatgatattttttatcataaatgcagaataatcaaatacattttaagcaagttaagtgtcctccatcaattctgtattccagacttgggaggatgtacagttgctgttgtgtgatcaaacatgtctctgtgtagttccagcaaatcaagctgagctttgaaaaagtttgtcttagttttgtgaaggtgatttattct

SEQ ID NO: 1404 - DNA, 485 bp, Homo sapiens
ccaaaggtggcctgggtttaatactcaagagaatggtggaaggttaaacagcttggatttattcttactttgtatgttgtgttgttgtccccagtgtcctacaaactaatgtatttgtgcacaagacatcatctatgaatgatgaagttttctcaccttcaaagtcttataaacatgttgactcttgttcctgctgagttacttgttcgaagcttacagcttgttttccaggcatcgaataactgttgagattgttctactgttgtcgtatattcttctatattgaattctggttaatttggagtaactaattctgtggctgttgtgagtcttcagcaccctcccatgtaccttatatccctctctgaaacagaacagctccaatagcaacaagctagttgttctgccagatgtttctatgtggattctgtaatgttcctccatacagttaaaacatcctaacttgtttttcaagctcactcagg

SEQ ID NO: 1405 - DNA, 536 bp, Homo sapiens
ccaggatcatcatgagttttctgaagacagtaatgaaatctaagaagagatcaatgcagtgccagatataatcttgatctccatgttcggccttttcaataatgagttgagtatcaaaaaggacgaagccacacatgaccaccagtcccacatacaggtttgcctggaaaagccaaatggatccaaagaaaacattccccagggaagacaaaagcaacaagctcagggctgacatcaagatacctcccagaaagaggtagctacggcgcctggcatagagtgcactgagggtgaagcaggtaaagatcattgccgtgcccatgaaagcagtgggaaggatgctggggttgacagcaatacaaaactccagggcagggcccaggccaactcctgtaaggaatgcaaatccagcaagaagtcccagtcttttctgttcagtttcatggctatgaggtgttgccatcagccaaatcatcaatatcagggagcccaaggcagacagcaggccagcctgaatgaaatgagtgaccatatgg

SEQ ID NO: 1406 - DNA, 470 bp, Homo sapiens
cctgaggtgtgtgccactcagagacttcacctaactagagacagtcaaactgcaaaccatggtgagaaattgacgacttcacactatggacagcttttcccaagatgtcaaaacaagactcctcatcatgataaggctcttacccccttttaatttgtccttgcttatgcctgcctctttcgcttggcaggatgatgctgtcattagtatttcacaagaagtagcttcagagggtaacttaacagagtgtcagatctatcttgtcaatcccaacgttttacataaaataagagatcctttagtgcacccagtgactgacattagcagcatctttaacacagccgtgtgttcaaatgtacagtggtccttttcagagttggacttctagactcacctgttctcactccctgttttaattcaacccagccatgcaatgccaaataatagaattgctccctaccagacctgcc

SEQ ID NO: 1407 - DNA, 497 bp, Homo sapiens
gtcgttgctgttgctgtttgtgagcctgtggcgcggcttctgtgggccggaaccttaaagatagccgcaatggctgaaaatggtgataatgaaaagatggctgccctggaggccaaaatctgtcatcaaattgagtattattttggcgacttcaatttgccacgggacaagtttctaaaggaacagataaaactggatgaaggctgggtacctttggagataatgataaaattcaacaggttgaaccgtctaacaacagactttaatgtaattgtggaagcattgagcaaatccaaggcagaactcatggaaatcagtgaagataaaactaaaatcagaaggtctccaagcaaacccctacctgaagtgactgatgagtataaaaatgatgtaaaaaacagatctgtttatattaaaggcttcccaactgatgcaactcttgatgacataaaagaatggttagaagataaaggtcaagtactaaatattcagatgag

SEQ ID NO: 1408 - DNA, 595 bp, Homo sapiens
  misc_feature 476, 586: n = A,T,C or G
aaatcacttctatcttctgtacttaagaactcaagtatagaaataaactgtgggctgaagtaacattgtaacctgctcccaacatgactgcataggtgtctaaggttaagtgtgaagattactgtgaggtctcaagttacttgactaatcaatcccatttgaatttcaatccaagcagcatattttacacacacctgaaggaaatatcttcagtgtgttcatgtgtgtgtctatgtgcatgtatgtgtaggggataggtgtaattagggaagggctgaccgaacaacattgataagtacatgctagaagtctgctgttgttggtaacacagaaacatacacagtcttcatattcaaagtcttcacggggatgtcttctgtaatttcctgcgtttgggtctcattcagaaacagctttagcttcctgctccgaaggccaaacaccttggctgcttcatacagaagaccttggtgggntgagtccattctgcccaagtgggttttcaagcaggagagtgcccactgtccccattaaacactcttgtggctttgcattcaggagctgtaggttgatatactgacaaagnagagtacta

SEQ ID NO: 1409 - DNA, 496 bp, Homo sapiens
aaattcatcattcctaatgttgtaaaatacagcccgaactgcaagttgcttattgtttcaaatccagtggatatcttgacctacgtggcttggaagataagtggttttcccaaaaaccgtgttattggaagcggttgcaatctggattcagcccgattccgttacctaatgggggaaaggctgggagttcacccattaagctgtcatgggtgggtccttggggaacatggagattccagtgtgcctgtatggagtggaatgaatgttgctggtgtctctctgaagactctgcacccagatttagggactgataaagataaggaacagtggaaagaggttcacaagcaggtggttgagagtgcttatgaggtgatcaaactcaaaggctacacatcctgggctattggactctctgtagcagatttggcagagagtataatgaagaatcttaggcgggtgcacccagtttccaccatgattaagggtctttacggaa

SEQ ID NO: 1410 - DNA, 519 bp, Homo sapiens
  misc_feature 498: n = A,T,C or G
aaattcatcattcctaatgttgtaaaatacagcccgaactgcaagttgcttattgtttcaaatccagtggatatcttgacctacgtggcttggaagataagtggttttcccaaaaaccgtgttattggaagcggttgcaatctggattcagcccgattccgttacctaatgggggaaaggctgggagttcacccattaagctgtcatgggtgggtccttggggaacatggagattccagtgtgcctgtatggagtggaatgaatgttgctggtgtctctctgaagactctgcacccagatttagggactgataaagataaggaacagtggaaagaggttcacaagcaggtggttgagagtgcttatgaggtgatcaaactcaaaggctacacatcctgggctattggactctctgtagcagatttggcagagagtataatgaagaatcttaggcgggtgcacccagtttccaccatgattaagggtctttacggaatnaaggatgatgtcttccttagt

SEQ ID NO: 1411 - DNA, 566 bp, Homo sapiens
aaaatttccctagtatatgtaaccatcagtaggtggtatctactgtctagagagggaagttttcgaaaattaaacactgtctaattttctgcaaagtttttattcatgaattaagagtatttccctttgtccattattcccaaggcaaatatggaagtttgatcatatactaatcgtaataaagttggattctctttaagagattgataaattgaaaggcaaaagctgatatatcatgtttagttatactgtgagtcttataagaagctgggaggcaaccccattaactcaccagaatatagaactcagtctcacaacttagatataattcctctcaaaccttttcctcaaagattaaattctgaaaataatcttgtgattaagagaagaaggctgtccaccaatggacttatctgttatttcttccttattgtgagcttgatggcatgacaaagcagaggcaaagaggcatacatcaattcttcaaagtatgaagtcaaaaaggtcagagcttccacagcatggcaacagctttgcagatgcccacatcgtgatagttgaaatag

SEQ ID NO: 1412 - DNA, 466 bp, Homo sapiens
cctcccaatgctgtttgtccgtctagctgtggtcttcctaagtattgatatcaattggaggctgaaggactatggcttctctactcaaaggagcctagtgggttaacaactgtcaagagcagtcagtggttctgaaatacaatcctcagccaaggatccctcctgtgttacagatggatcagctaaaacaaaccaacactgaagatacaaagaatggggttaggttcaatgaaaccagggtaacacctttggatgagctaaacacaaagatgacactgaccttgagcaggtatagaagctcagagacatgcctgcaaaatgaaacccctgaggaactttgtagctacccagagatatctggttcaaattagaatgtctggcagatcactcccggcatgtgctacatagtcgtgtgaacgtgtcacacctaacttgggtccaacgtcttcagactgagcacaggtgg

SEQ ID NO: 1413 - DNA, 429 bp, Homo sapiens
ccacgctggtctcgaactcctgacctcaggcgatctgcccgcctcggccccccaaagtgctgggattacaggtgtgagccaccgtgcctggcggaactaagattaaagcaaagaccacgatcaattacttaacaagaacaccacattttgatgctgtctacagggtcatttttttttgtcaggaaaatatctgatctgattcttcccagcttgcttcccctacaacttaataagcccttcactaacccctgtatgtattaactgcaattgcctagcccggcatttacactctcaaaagatttaacgcaattacaatcaaaaaacacttgtcatatataacactttttcacatggaaataaattggtggtttaaggtttacaattcctttgaataaaatttcagttattagttacaaaatgctaagacag

SEQ ID NO: 1414 - DNA, 407 bp, Homo sapiens
cctagtatgaggagcgttatggagtggaagtgaaatcacatggctaggccggaggtcattaggagggctgagagggcccctgttaggggtcatgggctgggttttactatatgataggcatgtgattggtgggtcattatgtgttgtcgtgcaggtagaggcttactagaagtgtgaaaacgtaggcttggattaaggcgacagcgatttctaggatagtcagtagaattagaattgtgaagatgataagtgtagagggaaggttaatggttgatattgctagggtggcgcttccaattaggtgcatgagtaggtggcctgcagtaatgttagcggttaggcgtacggccagggctattggttgaatgagtaggctgatggtttcgataataactagtatggggata

SEQ ID NO: 1415 - DNA, 488 bp, Homo sapiens
ctggggccactgtcggcatcatgattggagtgctggttggggttgctctgatatagcagccctggtgtagtttcttcatttcaggaagactgacagttgttttgcttcttccttaaagcatttgcaacagctacagtctaaaattgcttctttaccaaggatatttacagaaaagactctgaccagagatcgagaccatcctagccaacatcgtgaaaccccatctctactaaaaatacaaaaatgagctgggcttggtggcgcgcacctgtagtcccagttactcgggaggctgaggcaggagaatcgcttgaacccgggaggtggagattgcagtgagcccagattgcaccactgcactccaktctggcaacagagcaagactccatctcaaaaagaaaagaaaagaagactctgacctgtactcttgaatacaagtttstgataccactgcactgwctgagaatttccaaaactttaatgaacta

SEQ ID NO: 1416 - DNA, 350 bp, Homo sapiens
ggtttggaaccccagagggagagtttgtgtccatgggtgttatctctgatggcaactcctatggtgttcctgatgatctgctctactcattccctgttgtaatcaagaataagacctggaagtttgttgaaggtctccctattaatgatttctcatgtgagaagatggatcttactgcaaaggaactgacagaagaaaaagaaagtgcttttgaatttctttcctctgcctgactagacaatgatgttactaaatgcttcaaagctgaagaatctaaatgtcgtctttgactcaagtaccaaataataataatgctatacttaaattacttgtgaaaaacaacacatttt

SEQ ID NO: 1417 - DNA, 475 bp, Homo sapiens
ccactagaggtctgtgtgccattgcccaggcagagtctctgcgttacaaactcctaggagggcttgctgtgcggagggcctgctatggtgtgctgcggttcatcatggagagtggggccaaaggctgcgaggttgtggtgtctgggaaactccgaggacagagggctaaatccatgaagtttgtggatggcctgatgatccacagcggagaccctgttaactactacgttgacactgctgtgcgccacgtgttgctcagacagggtgtgctgggcatcaaggtgaagatcatgctgccctgggacccaactggtaagattggccctaagaagcccctgcctgaccacgtgagcattgtggaacccaaagatgagatactgcccaccacccccatctcagaacagaagggtgggaagccagagccgcctgccatgccccagccagtccccacagcataacagggtctccttggcag

SEQ ID NO: 1418 - DNA, 515 bp, Homo sapiens
ctgagtttactggcagcaatgggtaacacacagaggaaagaggcagcagatcccctagcatctaaacttaacaaggtcacccaattgacaggtttctcagatcctgtatatgcagaagcttacgttcatgtcaaccaatatgatattgtcctggatgtacttgttgtgaaccaaaccagtgatactttgcagaattgcacattagaactagctacactaggggatctgaaacttgtggaaaagccgtctcctttgactcttgctcctcatgacttcgcaaatattaaagctaacgtcaaagtagcatcaacagaaaatggaataatttttggtaatatagtttatgatgtctctggagcagcaagtgacagaaattgtgtggttctcagtgatattcacatcgacatcatggactatatccagcctgcaacttgcactgatgcagaattccgtcagatgtgggccgaatttgaatgggaaaacaaagtgacagttaacaccaacatggttgattt

SEQ ID NO: 1419 - DNA, 446 bp, Homo sapiens
ggcggagggaaaaaggaagaggagaaggaaattgtcccgaatccctgcagtctttctgtaggttgcggcacaacgccaggcaaaagaagaggaaggaatttaatcctaatcggtggaggtcgatttgagggtctgctgtagcaggtggctccgcttgaagcgagggaggaagtttcctccgatcagtagagattggaaagattgttgggagtggcacaccactagggaaaagaagaaggggcgaactgcttgtcttgaggaggtcaacccccagaatcagctcttgtggccttgaagtggctgaagacgatcaccctccacaggcttgagcccagtcccacagccttcctcccccagcctgagtgactactctattccttggtccctgctattgtcggggacgattgcatgggctacgccaggaaagtaggctgggtgaccgcagg

SEQ ID NO: 1420 - DNA, 490 bp, Homo sapiens
cctacagacttatttcttcttagacacacccacggtgcggccacggcggccagtggtcttggtgtgctggcctcggacacgaaggccccagaagtgacgcagccctctatgggcccgaatcttcttcagtcgctccaggtcttcacggagcttgttgtccagaccattggctaggacctggctgtattttccatcctttacatccttctgtctgttcaagaaccagtctgggatcttgtactggcgtggattctgcataatggtgatcacacgttccacctcatcctcagtgagttctcccgccctcttggtgaggtcaatgtctgctttcctcaacaccacatgagcatatcttcggcccacacccttaatggcagtgatggcaaaggctattttccgccgcccatcgatgttggtgttgagtactcgcaaaatatgctggaacttttcagggatcactagagacatggctgcagcacaagcggcggcg

SEQ ID NO: 1421 - DNA, 116 bp, Homo sapiens
aaactaaatattgaaaatgttagtcaaattgtggtttgcttgtcaggtatttatatcagtctgtagtggattcccaaatttcaaagctcttttaatgtaatggacaaaaataagat

SEQ ID NO: 1422 - DNA, 528 bp, Homo sapiens
  misc_feature 482: n = A,T,C or G
aaaaaaaaaaagcaaagctttctgccagactgagggtgccttttggggggtgggagaaatgaactgacagataaacagtaactcagcgtaagtgacctgtggatcatcagtagtacccaagcatggtcctgaacagtgtattagcagagctttagtttatctcagtcctggatgggagagagagggaggagtaaaactgggcaagacaaagagccctggatcgttgaattgatagtttaatttctgctgttggctgttaataatttggattatttatgtttataaatgatacagatctgtttacaaggtttgtagatactttttttgttcctgttcatagatgggaagcttccttataactgatgcagagaaaaattagtccttcaaatactgctgtattttcaggaaaaaaaaaaggggtgtttctattgaaactgtactaaatttttgcctacaatttaccttgttaaatattgtagatnaattgctaatactaatagccaaatagataacactaatgctttgttt

SEQ ID NO: 1423 - DNA, 566 bp, Homo sapiens
  misc_feature 565: n = A,T,C or G
ctgaattctcaatgcagggtctaaaagctggtgttattgctgttattgtggttgtggtgatagcagttgttgctggaattgttgtgctggttatttccagaaagaagagaatggcaaagtatgagaaggctgagataaaggagatgggtgagatgcatagggaactcaatgcataactatataatttgaagattatagaagaagggaaatagcaaatggacacaaattacaaatgtgtgtgcgtgggacgaagacatctttgaaggtcatgagtttgttagtttaacatcatatatttgtaatagtgaaacctgtactcaaaatataagcagcttgaaactggctttaccaatcttgaaatttgaccacaagtgtcttatatatgcagatctaatgtaaaatccagaacttggactccatcgttaaaattatttatgtgtaacattcaaatgtgtgcattaaatatgcttccacaggaaaatctgaaaaactgatttgtgattgaaagctgcctttctatttacttgagtcttgtacatacatacttttttatgagctatgaatna

SEQ ID NO: 1424 - DNA, 503 bp, Homo sapiens
aaattttgagaagagtagttcagtctctcgatatggagcctctcaagttgaagatatggggaatataattttagcaatgatttcagagccttataatcacaggttttcagatccagagagagtgaattacaagtttgaaagtggaacttgcagcaagatggaacttattgatgataacaccgtagtcagggcacgaggtttaccatggcagtcttcagatcaagatattgcaagattcttcaaaggactcaatattgccaagggaggtgcagcactttgtctgaatgctcagggtcgaaggaacggagaagctctggttaggtttgtaagtgaggagcaccgagacctagcactacagaggcacaaacatcacatggggacccggtatattgaggtttacaaagcaacaggtgaagatttccttaaaattgctggtggtacttccaatgaggtagcccagtttctctccaaggaaaatcaagtcattgtccgcatgcgggggc

SEQ ID NO: 1425 - DNA, 428 bp, Homo sapiens
aaatgtctgacccgaaagagaatgtatttacactcatgctgcgttgttcagcagcccctctgtgttctgtgtgatttgttttatttttccttttttacatatatatgcagggaagtaatggtactggtagtgtatgttttctatgtggttcaaatatgaatttcgaacacaccaagccgctaatgagatagcagcttttttctgggacccagagtcacaaccaaattgatttaagaccggacccaagacacctttaacaataggactgaaaggaaaaaggatagggaaaaagcttattaaagaaatgtgtcaacaccaaatgtagaggggaagaaccacaaccaggcataataccaaaccggttccagggggaaacaaggctttggtattccgctggctccagcgctttttctgaaacccgaggctgg

SEQ ID NO: 1426 - DNA, 584 bp, Homo sapiens
ctggaacgtcagcccagcgagccgaactgatcgcactcacccaagccctgaaaatggcagaaggtaagaagctaaatgtttacactgatagccgctatgccttcgctacggcccatgttcatggggaaatatataggagacgggggttgttgacctcagaaggcaaggaaatcaagaacaaaagcgagatcctagccttgctgaaagccctctttttgccaaagagactcagtattatccattgcccaggacatcagaaaggagacagtgccgaagccagaggcaaccgtatggcagaccaggcggcccgagaggcagccacaaaaacagttccagaagcctctacactccttatagaggactcgaccccgtacacgcctgcctatctccattacaccgaaacagatctaaaaagattgcgagaactgggggccacctataatcagataaaaggatattgggtcctacaaggcaagccggtgatgcccgatcagtttgtgtttgaattattagactcccttcatagactcacccatctcagccctcaaaagatgaaggcgctccttgacagaraagaaagcccc

SEQ ID NO: 1427 - DNA, 511 bp, Homo sapiens
ccgggcaggtccaaaggcacgcagaagatgacacgagccccacggaattctgggggtacacctaggacctctagtaaacctcataaacatctgcctcctgcagccctacacctcattgcatactacaaagaaaacaaagacagggaggacaagaggagcgccctgtcctgtgttatctccaaaacagctcgtcttctctctagtgaagatagagctcgtctcccagaagaattgcgaagtcttgttcaaaaacgctatgaacttctagagcacaaaaagaggtgggcttctatgtctgaagaacaacggaaagaatatttgaaaaagaaacgggaggagctgaaaaagaagttgaaggaaaaagccaaagaacgaagagagaaagaaatgcttgagagattagaaaaacagaagcggtatgaggaccaagagttaactggcaaaaaccttccagcattcagattggtggatacccctgaagggctgcccaacacgctgtttggggatgtgg

SEQ ID NO: 1428 - DNA, 478 bp, Homo sapiens
ctgaaccctcgtggagccattcatacaggtccctaattaaggaacaagtgattatgctacctttgcacggttagggtaccgcggccgttaaacatgcgtcactgggcaggcggtgcctctaatactggtgatgctagaggtgatgtttttggtaaacaggcggggtaagatttgccgagttccttttactttttttaacctttccttatgagcatgcctgtgttgggttgacagtgagggtaataatgacttgttggttgattgtagatattgggctgttaattgtcagttcagtgttttaatctgacgcaggcttatgcggaggagaatgttttcatgttacttatactaacattagttcttctatagggtgatagattggtccaattgggtgtgaggagttcagttatatgtttgggattttttaggtagtgggtgttgagcttgaacgctttcttaattggtggctgcttttagg

SEQ ID NO: 1429 - DNA, 480 bp, Homo sapiens
aaaaattaaacacacacacacacacacacacacacaccaatttctttgcagtcctgcatttcttaggattcagttctggacttggtcttcactttctctgccttctggctgcaagaaatgcaaccctcttttaccaccaaggaggccctctggctctctcacttagctttcaattgctgattgattgcatttagctttttactacttttttccccagagtcttggaaagagccacctaactgcattggtctatttacgtaccagtgccatgctgtttaagtatcagaggcttcatagtatgttttaatattggctaagactaggccctgctcagaactcttctttccctgtgttttcctagctattgcgtgtgtatttttccataagaactttagcgtcaacttatctggttccatcgaaaagcatatgtgggtgtttttagggtgaccattaagcctatcaatcaactcagggagaact

SEQ ID NO: 1430 - DNA, 580 bp, Homo sapiens
aaaaaatacaggagtcgatagcagcagttggtgacgagatggcactcagaaacggcgttgacgtaatttaggacgtggaatcataagcgaaacagcacactgtttgaataaagagcgagtcggtatttatatttgtttttcttttgtcatgattatttgatttttaagttgctccagctaaggcatttttttgtattagtatttctattagggaacctttcttattaggtggtttgtattgtctggtttctaacatgcaggtagctgtttggcagttaaacacgtttagagtaatttgagttacaacgtgtgaaactgagcaaaaaagcagtgataagtttgggttaccataccaaatatttgttttcccactggaaaaaagtaagttttagaaaatagttaacctttgcagcatttgtttacagtttacagttccagaagtgcgtcgaaatggattacataactgctcttttattcctggtgttcacatctgtcccaggctgacacctgctcttggctggcccactttggtatgggctttaatttcactaccccaaacacgatactgtcatctgcttta

SEQ ID NO: 1431 - DNA, 510 bp, Homo sapiens
cgcacagttatcgtgaagggccccagaggaaccctgcggagggacttcaatcacatcaatgtagaactcagccttcttggaaagaaaaaaaagaggctccgggttgacaaatggtggggtaacagaaaggaactggctaccgttcggactatttgtagtcatgtacagaacatgatcaagggtgttacactgggcttccgttacaagatgaggtctgtgtatgctcacttccccatcaacgttgttatccaggagaatgggtctcttgttgaaatccgaaatttcttgggtgaaaaatacatccgcagggttcggatgagaccaggtgttgcttgttcagtatctcaagcccagaaagatgaattaatccttgaaggaaatgacattgagcttgtttcaaattcagcggctttgattcagcaagccacaacagttaaaaacaaggatatcaggaaatttttggatggtatctatgtctctgaaaaaggaactgttcagcaggctgatgaa

SEQ ID NO: 1432 - DNA, 559 bp, Homo sapiens
aaaagcattttctgaatttatttttgtgtttttcaagtcaagattaaactatctatgttttcaagtcaaggctgaattataaatgaacttctcagtatttagataccagaataaaaagaacaagcaaaggttgtgtaggatatctgagttttttttttttttaatctgaacagaaaataagtatacaagttcgctaaacagaagtggtaaaaattgaatgttatgtattatggaattcagtacatcagtttacttcggtagccagtgattgttatagttaattctgcaaaaaaacaaaaccagttatgcaaaaacaagagtacaaaatgcccctttctgaagctcagtttgagaaactgatttcgtatctagcttattgattatactcagtttcaattctccctgtgcaaataatacataaagtcattaatgatgatttgatgaactgaaatcatcttcgcttaggatcgtttgacatcataacccaaatataaaaaagttattcaagattcacagagataaaacagtgcctcggaaacataattcacccatgtatata

SEQ ID NO: 1433 - DNA, 521 bp, Homo sapiens
ccattggattgagcaaaggcagaaatgggggctagtgtaacagcatgcaggttgaattgccaaggatgctcgccatgccagcctttctgttttcctcaccttgctgctcccctgccctaagtccccaaccctcaacttgaaaccccattcccttaagccaggactcagaggatccctttgccctctggtttacctgggactccatccccaaacccactaatcacatcccactgactgaccctctgtgatcaaagaccctctctctggctgaggttggctcttagctcattgctggggatgggaaggagaagcagtggcttttgtgggcattgctctaacctacttctcaagcttccctccaaagaaactgattggccctggaacctccatcccactcttgttatgactccacagtgtccagactaatttgtgcatgaactgaaataaaaccatcctacggtatccagggaacagaaagcaggatgcaggatgggaggacaggaaggcagcctgggacattt

SEQ ID NO: 1434 - DNA, 456 bp, Homo sapiens
ctgaaccctcgtggagccattcatacaggtccctaattaaggaacaagtgattatgctacctttgcacggttagggtaccgcggccgttaaacatgtgtcactgggcaggcggtgcctctaatactggtgatgctagaggtgatgtttttggtaaacaggcggggtaagatttgccgagttccttttactttttttaacctttccttatgagcatgcctgtgttgggttgacagtgagggtaataatgacttgttggttgattgtagatattgggctgttaattgtcagttcagtgttttaatctgacgcaggcttatgcggaggagaatgttttcatgttacttatactaacattagttcttctatagggtgatagattggtccaattgggtgtgaggagttcagttatatgtttgggattttttaggtagtgggtgttgagcttgaacgctttc

SEQ ID NO: 1435 - DNA, 441 bp, Homo sapiens
ctgctgcctgtggcgtgtgtgggctggatcccttgaaggctgagtttttgagggcagaaagctagctatgggtagccaggtgttacaaaggtgctgctccttctccaacccctacttggtttccctcaccccaagcctcatgttcataccagccagtgggttcagcagaacgcatgacaccttatcacctccctccttgggtgagctctgaacaccagctttggcccctccacagtaaggctgctacatcaggggcaaccctggctctatcattttccttttttgccaaaaggaccagtagcataggtgagccctgagcactaaaaggaggggtccctgaagctttcccactatagtgtggagttctgtccctgaggtgggtacagcagccttggttcctctgggggttgagaataagaatagtggggagggaaaaactcc

SEQ ID NO: 1436 - DNA, 557 bp, Homo sapiens
ccaggcaggtctcgaactcctggcctcagatgatctgcccaccgtagcctcccaaagtgctgggattacaggtatgagccactccacccagcccagagttttcatttgttccttaaaataattaagctggaaaggcaaggacaattatgagcacaactgtagtcaagttgagaagacctcaaaaaagtcaagtttagaccttcggattttccatagaagagaaaaagatactaggttttagggtacagagagccagatctgaagagtagctgcagggggaaggtgctgttagaaggaggatatagacacattctctggggggaacatatggtgactgacccatgcacacaaagggggccttagcgaaactgcagaggactgatccttaaaccaatcacatctttgccaatctctgtcactgtggtgaccctgcagatttgacctttgaactcaggggaatagcaggccccactgagtggacacttttctactggctttccacggtagatgggccgatatgatgcagcacaaatgtcaaaggggttgtgcatgtcata

SEQ ID NO: 1437 - DNA, 529 bp, Homo sapiens
cgctctcaaagttgacggcatctctgcgtggatacacgccgctcacgtaaaggcggcgacaactcctccggccggagcagcatggaaggtccagcgttctcaaaaccccttaaagataagattaacccgtggggccccctaatagttatagggatcttggtgagggcaggagcctcggtacaacgtgacagccctcaccaggtcttcaatgtcacttggagagttaccaacctaatgacaggacaaacagctaacgctacctccctcctggggacgatgacagacaccttccctaaactatattttgacttgtgtgatttagttggagaccattgggatgacccagaacccgatattggagatggttgccgctctccggggggaagaaaaaggacaagactgtatgacttctatgtttgccccggtcatactgtaccaatagggtgtggagggccgggagagggctactgtggcaaatggggatgtgagaccactggacaggcatactggaagccatcatcattatggg

SEQ ID NO: 1438 - DNA, 235 bp, Homo sapiens
aaagaatcagcaaaatttcaaataaaaaattatgaaaatattatcctcattagttcatttagtcccatgaaattaattattttctctgcttgatcttggtggacagtttcatgaagctgtcagttagttcattaaagttttggaaattctcakacaktgcadtggtmtyagaaacttgtattcaagagtacaggtcagagtcttcttthcttttctttttgagatggadtcttgc

SEQ ID NO: 1439 - DNA, 462 bp, Homo sapiens
ttggtgcttcccgtgctgctgttgatgctggctttgttcccaatgacatgcaagttggacagacgggaaaaatagtagcaccagaactttatattgctgttggaatatctggagccatccaacatttagctgggatgaaagacagcaagacaattgtggcaattaataaagacccagaagctccaattttccaagtggcagattatggaatagttgcagatttatttaaggtagttcctgaaatgactgagatattgaagaaaaaatgaatcaggatcatgccttaaaaagaaaacttttgttaaagtattccactgaaatcacagatatttgtgggtattataacaatcattggaaagcatggagagctacatttcataatttgagggaaaatttctaacagatgccagaatgcttgtttatgggattgctgtgtttccttttaattatttgtggttccaa

SEQ ID NO: 1440 - DNA, 454 bp, Homo sapiens
ctggcgctgctgctgcatcagggccatcctttctgcaagacacaatgaccacagcaaagagcgggaaagataactttccacgacatcgccacattgtttgacgtcctttcatcaaatcactgtatgctattaaaagtcaccgtgtaactggagttacattattcacagaggccattaagacttctcttattagacaatataacttttgtgacagaaataggctgcacagatctctaagataaaattcacgttattgcacattttgtttctccagtcaggtcttcaacacgtaagatatgattacaacattaaggctttgtacagcatgaggtaaaatatcaggaagaatcttgatgtgagccacacctcttttagagtgagaaaaaaaaatttttttttttggtcaattgtacagaagaggacacaatctgatatattttacaactgataaatg

SEQ ID NO: 1441 - DNA, 439 bp, Homo sapiens
ccaccccttcatcaagactgtgggcatggtggctggagatgaggagacctatgaggtatttgctgacctgtttgaccctgtgatccaagagcgacacaatggatatgacccccggacaatgaagcacaccacggatctagatgccagtaaaatccgttctggctactttgatgagaggtatgtattgtcctctagagtcagaactggccgaagcatccgaggactcagtctgcctccagcttgcactcgagcagagcgacgagaggtggaacgtgttgtggtggatgcactgagtggcctgaagggtgacctggctggacgttactataggctcagtgagatgacagaggctgaacagcagcagcttattgatgaccactttctgtttgataagcctgtgtccccgttgctgactgcagcaggaatggctcgagactgg

SEQ ID NO: 1442 - DNA, 534 bp, Homo sapiens
aaaaactgcattactgaatttaacaaaagtcagacactagaatcatatatttgctgcataaaagttgatttgatacctggtggtgattgaatttagtctcaaagactcataaataaaaatctgacttaagacgtagtcataccagtataccaattctcccatcactttgactttcggcagagagattagagcaaaaaatattcaggagaacagtggagttacattgtattatgtatgtttaatataatatcaattttaaggttaaggttaaggaaatcttaattttaaggttaaaccttgagtactagttatagaacttaatattcctggttaaagagtaagttaactgggttattatgtggccttggttgaagaccataaattatgcatttatgcatttgtggttgctttggttctcaatacattgaatatgcatagccccttctagaaatatatatagtgagaaatctgtaaaatgggggagttagactaagtgtgaactaaaatcttcccactgtgtacaggacacatcar

SEQ ID NO: 1443 - DNA, 495 bp, Homo sapiens
aaaactatatgagcagtggaagaatttcgatgagagaaaagagatggcaaccattcttagtaagatgccaaaaccaaaaccacctccaaacagtgaaggagagcagggtccaaatggaagtcagaactctagctacagccaatcttaaaacattccgaagaattccatagtggaccacttggaaataaaccattggacagatttcagtaatgtcttcagtggaacacaaatgaaaatgaatagcttgtttctgtcaagcatattggaaagtgattttatttttgcaaaataagtttttctttaatatgattctagtacataattgattaaaatctcttgattataaatgtttggaaaggttctaaggggacctacagacagacatacatagacatttcaaaattaatagcttttgattagtataatatttcttaatttggataataaaaattgtagctttttattaagccaggaaacatgaagcataatttgttt

SEQ ID NO: 1444 - DNA, 510 bp, Homo sapiens
aaattattaaactcccttcatagactcacccatctcagccctcaaaaaataaaggcgctccttgacagagaaaaaagcccctactacatgttaaacagggacagaactcttcagtatgtggcagaatcctgcacagtctgtgctcaagtaaatgctagtaaagccaaaatcggggcaggggtacgagtacgcggacatcgaccaggtacccattggaaaattaacttcactgaagttaaaccagggctgtacgggtacaagtacctcctggtgttcgtagacaccttctctagctgggtgaaagccttcccaactaaacgtgaaactgccaaggttgtgaccaagaagctattaaaagaaatattcccaagattcgggatgctacaggtattgggttccgataatgggcctgccttcgtctcccaggtaagtcagtcggtggccgatttactggggatcgattagaaattacattgtgcttatagaccccagagttcaggtcaggtaaaa

SEQ ID NO: 1445 - DNA, 471 bp, Homo sapiens
ccagtaccggcacctctgagtatgccgcttatgaccagaacatcacacctttgcacacggacttctctgggagcagcactgaaagaatttgaaactgacttttggagctttccttcttttttcatttcaactgaaaatgctttaggtaaaaacctttccagtatgttcacctctagaatagccacccaaagaccttcctgaggctgcctcagaagcaccacttgctgttttgaatgactctactagtatgagaaggatgtgaaggtggttggctggttgggctttaacttcctgggattcataatttttaagcttggaagatagctgctgttcccatgatgggcacatttcctgagaagcttgaatgactgatgagcatagagcacccctgccttcctcaggaaacctgaccggcaggggctctctggcttcctgaaagcttcacctcttccctcgtttatatctcaactg

SEQ ID NO: 1446 - DNA, 547 bp, Homo sapiens
aaaaatcagacaaaagacttaagaattactatgttaaatttctaatccaaatgtaaaacaagaatacaggatattggcaatgctaatattcaaaatgggtttaccccagttcataattcctctgctcccctcctacctaaaatctaagaaagtattcattataaattggaagtacagaattcttaaaaagccaactggatgctgagttgtatgattttctttacaggtacaatttacttttcagcaacctgtaagccatggaaagagtaactccatatccaacaaaaaaactcaaagctctatttggctggggaaggggtgtcaaatatgcaatggtgtggtagatccgtgctccggcaaatagtctgaagtgcaggatggctgtagaggggtcgggaccactcaaggaatacaggaggccaattccaagaaatggaataatattttcaaggtcattcaggtgggctctgcgtacacgttctactctgtcatctgttcgaagatacttcttggcattttctcctttgccaaatgctacacagtcttc

SEQ ID NO: 1447 - DNA, 66 bp, Homo sapiens
ggcgtagacgagttaagtcctggtctgcgtggaggtcgacgactccgtcgcagactacggacctgt

SEQ ID NO: 1448 - DNA, 466 bp, Homo sapiens; identical to SEQ ID NO: 1412

SEQ ID NO: 1449 - DNA, 453 bp, Homo sapiens
aaataaggcttggggtttttcccggtcttttggggaacttgaaactgaggtgggactttccagaaactgttgctagtttcgctttatctgagtaccatctgttcttggccctgagccggggcccaggtgctcgaccacagatatcctgtttggcccctgtcccagttttgttcagccttattctttaactaaacttccttgtgacttttgagaactcagctctggtactttttcatgccttgcaaaatggcgttactgcagctagcttgctaagccttatggtggggtctttcattcccccctctttctggaaactgaataaaatcttttattcacgcgattctacttcttctggatctattgatttgagttggtgatactgttgggtcagaaccagggcctgcaccaccgaaattytgtcttttacaaactggaccaagcggttgagaatgc

SEQ ID NO: 1450 - DNA, 522 bp, Homo sapiens
cctgctgggcttggcaacgagggactcggcctcggaggcgacccagaccacacagacactgggtcaaggagtaagcagaggataaacaactggaaggagagcaagcacaaagtcatcatggcttcagcgtctgctcgtggaaaccaagataaagatgcccattttccaccaccaagcaagcagagcctgttgttttgtccaaaatcaaaactgcacatccacagagcagagatctcaaagattatgcgagaatgtcaggaagaaagtttctggaagagagctctgcctttttctcttgtaagcatgcttgtcacccagggactagtctaccaaggttatttggcagctaattctagatttggatcattgcccaaagttgcacttgctggtctcttgggatttggccttggaaaggtatcatacataggagtatgccagagtaaattccatttttttgaagatcagctccgtggggctggttttggtccacagcataacaggcactgcctccttacctgtggg

SEQ ID NO: 1451 - DNA, 487 bp, Homo sapiens
aaagagatgggggtcttactatgttggctaagctggtctcaaactccttgcctcaggtaatccttctgcctcagcctcccaaagtgctgagattacaggcatgagccaccatgcccgacttccctttgtgtaaaatgagataatatgtatgtcacagaattgttttaaggatgataaaggactaagtgagataatgtaggtgaagtttagtatgatgcctggctcatagttaagtgctgaattatgatagtaatcaatatctactcctaacctctttcttcacagattttaagcttctgtctttctagggggttaagagtcataaaccaaaattacactttcctctgctaggtttcctccctttcctcttcttgacagtctgatgggaaacaaaggcacacataagagcctagttccaagtagtcaagagcctgagaggaagggatatggagagtaatccttcatatctccaggagtgcctgtgaag

SEQ ID NO: 1452 - DNA, 543 bp, Homo sapiens
aaatgttatttctaaatcagataccaggaagcaactatgtgagaaagaaaatgaaaattctaggtctaatacatgttaaacaagtttcaggtaatagtagctgagaaaaatattgatgcacataatgaaacaaaaagaattgccagatataatgtggtgcacagggtactcgataaaaacatgcactttgtctcgctgaaatgtccttaaatattgtctgagcaccaaattctgcaaaagcaaggatctagaattccgaattttagaagttataaagagaacttcactgcaattaaaagagaaggcaaaaattccaacttcctgaaggaccccattattcatatagaatcatgacaaaatttaccatggaattagaatgatacctatgttcttccactagattcacttattaagagatctgtctttatatggaagtaatgtttcacggaatgaaactaacattcatagtaatctctgatatcacattgaagggaacagcatacgagcaaacaaattttagaatctgttttgtgaatagtctga

SEQ ID NO: 1453 - DNA, 308 bp, Homo sapiens
aaaacattaatcctcataagcagtacaaggcagaacaaaagtgctgagtggtaggaaaatgaataaaaatttcctatcaggagaataaagtttgtgtaaactatcttatatcctgaagatcactttaatgaccacctataaaatacaaagtttcctaaatactctctgatttatagatatttctcttacagtccactgctcctataaaattacagcaaaaaatattaaaattatttaccttcttcttaaatatccatggcacttgtcaagtacatgctactgtgaatctactggtcattatataattt

SEQ ID NO: 1454 - DNA, 244 bp, Homo sapiens
aaaaagggaaagttttgttctgtatattttgttaccttttacagaataaaagaattacatatgaaaaaccctctaaaccatggcacttgatgtgatgtggcaggagggcagtggtggagctggacctgcctgctgcagtcacgtgtaaacaggattattattagtgttttatgcatgtaatggactatgcacacttttaattttgtcagattcacacatgccactatgagctttcagactccag

SEQ ID NO: 1455 - DNA, 244 bp, Homo sapiens
ctggaacatggcaagaaggtggacatgtgaaaggcatgttacagacaacagatgggccctctctgctgacaatgaggttcgaggaggtgtgctggaatttttcagaagccagtcatgcctagactggtgagggaaaatacctttggtgtatgacccctcactcccactccagggtaaagggaacattttcggaccttagaggtggaactgtctgcctgggaaccattctccactcccacctcag

SEQ ID NO: 1456 - DNA, 346 bp, Homo sapiens
cctaaggcaggggccatgctgcaggagcagggcctgtaaaccagtcaatgctgtcatgcaacacggggacagctcagggctgagctccacaggcgaggggccaggtaggcccttcaaagcagatacaaccactaacaggaaggaaggtcaggctggctttagtgcagggaagggtagtgttgggagggggatgttcatgaaggaaagtgggtagctgaggcttcaaagggcctgcatgggacaggggtttaggggaagtgaagaggcccaataaagtcttgggggtaaagatgggaataaacaggagaaaggaacgaggaggcaggtgctgggatgcagagtccag

SEQ ID NO: 1457 - DNA, 322 bp, Homo sapiens
ccaatagctgatgttattgaatgcttactttctgccaggcactgtttggagacggtcagctatactttctccttgaatccaccccaaaattctctgggaaagaaattattatcctctcttttgtaaagatgaagagaatgaagtacaaagactagcttgtgcaagctagcagagggcagggaggagtaaacccaggcaagtctatgcttcccaccttcacgccacactggctgggggctcagtgggtggaggaagtttctctgagaatgccccgaaggatgagtaggattcagtcacataaaggggtctgggtggatggagg

SEQ ID NO: 1458 - DNA, 354 bp, Homo sapiens
  misc_feature 94: n = A,T,C or G
ctgaacactgaaagacttcaacatatctgtccttcatgttttttttatgacgcttctgtgcggccataaatgctctgtccgcagacttcatctngataaaggcatctcctgatgggcggccctggtgattcaaaaccatgtgaaccccatgagtackaatatctgtggcgaactcccccaggaaatccaggatgtcctcaattgtggctgcatagggaagacctcraaggcgtatacagtctctaacatttgtagggggcacaaattgctgaggtagtactggaataatgggaggggttggaagtggaatgagaggggccgaggagaatcgattcagcacctgctgaacttcar

SEQ ID NO: 1459 - DNA, 489 bp, Homo sapiens
tcggccgaggtctgacctggcctcttgcctaaaccacaaggctaagggctatagacaatggtttccttaggaacagtaaaccagtttttctagggatggcccttggctgggggatgacagtgtgggagctgtggggtactgaggaagacaccattccttgacggtgtctaagaagccaggtggatgtgtgtggtggctccagtgggtgtttctactctgccagtgagaggcagccccctagaaactcttcaggcgtaatggaaaatcagctcaaatgagatcaggcccccccagggtccacccacagagcactacagagcctctgaaagaccatagcaccaagcgagccccttcagattcccccactgtccatcggaagatgctccagagtggctagagggcatctaagggctccagcatggcatatccatgcccacggtgctgtgtccatgatctgagtgatagctgcactgctgcctgggattgcag

SEQ ID NO: 1460 - DNA, 249 bp, Homo sapiens
cctctagaggtggtccctccaggtcagggttgaggcacgtggacggggtggtgtggggaaagctcgcactgtcgctgcctgtgctgtacctgtcctgaccacctgcaaagatgaccggagagctggacggcttgggccggtacgggatggtcacgcccttcgggggggactccaacatgaccacgcagatctgtttgacacactcaatgatggattgtggaatgccagcaatagtgatggcccgctcag

SEQ ID NO: 1461 - DNA, 214 bp, Homo sapiens
ctgaaagaaagcccgtgcagtcatatcacgcgtaaacatttgctttatgctaaaaatatggtggacctggcattacagctattacaaatctcctaagatgtctcgggtagtgtattagttacttttcatactgctatgaagaaatactggaaactgggtaatttataaagaaaaagaggtttaatgtactcacagttccacaaggctggagagg

SEQ ID NO: 1462 - DNA, 561 bp, Homo sapiens
ctgccttttgtctagcctgctatggggggccagattatcttgataagagcaggtgatttggggactagctgggttggcaggaaaagagcaggatggatctcttgggacaggttcccccaggagtataaacacaaggagccaggattgtgctggcagccaaggaaacagtagtgcctgtttgagttggcagagagggccttggcacctcttgcatccaggcagtcttgtgagatgggggcacatagcactggggaaagcagaactccattctcacctctattttgagcttcagtgctttatttcagtatgaggaaaaacaacaacaaactgaagtgcgctttccgtcctttcaaaggacaactgtcgggaagggagagccgagttgcgaggtaggaggggagcactggcagggagagacattcttgactcctctcttccctggtgtgttgcgatccagggaatgaaaagaaatttgaccctggattggttctctccttggacttaaggaatcttaccttttccttccacaaagttctcccaggcaaggaccagacctcggcc

SEQ ID NO: 1463 - DNA, 232 bp, Homo sapiens
ctggctcgtggcagaatcaaaaccagaactcaggtccatgccccaaagtccctcctgctgcttttctgaagacaggaagaggctggggataggatgcctgtcctcatccctcacccggccctcttgggaggctctcaaacagccccactaaggatcggatgagtccgcatgcgatagatgattactgcagtggctgggcacagcaacaacgaggtcatgatgacaatggtgg

SEQ ID NO: 1464 - DNA, 145 bp, Homo sapiens
cttcaataatgttaagcttcaaaggcttctggtacgtttgtctaccacagaaccaccacaatatatatgcttgttcttaggtttattgctttttattttaatggggtttggttgtttgggttttattttggttttggcttatttt

SEQ ID NO: 1465 - DNA, 232 bp, Homo sapiens
caatatggtgaaaccttgtctctactaagaatacaaaaattagccgggcatggtggcgtgtgcctgtaatcccagctactcgggagggtgaggcaggagaacccaggaggcagaggttgcagtgagctgagattgcgccgctgcactccagcctggtgacagagcaagactccgtctcgagaaaaaaaaaagggtggaaggaaagccaaggaaggtgtgagtggtgagtggc

SEQ ID NO: 1466 - DNA, 288 bp, Homo sapiens
gtgagggagcacacgttgcatttggaggcagagctggaaaagcacatggcggccgccagcgccgagtgccagaactacgccaaggaggtggcagggctgaggcaacttctcctagaatctcaatctcagctcgatgccgccaagagcgaagcccagaaacagagcgatgagcttgccctggtcaggcagcagttgagtgaaatgaagagccacgtagaggatggtgacatagctggggccccagcttcctccccagaggcgcccccagccgagcaggaccccgttcag

SEQ ID NO: 1467 - DNA, 229 bp, Homo sapiens
aaagacagtaagagaacacctagtgtaagttaggtgaattaaagatggcaaaggagattacatcctcaacactgacagcttccaagacttagaaaagagattgttccttgcttctaaaattgttctattttcccctgtaggaaaatgaaagttttttcttacaaatattaaataatcaaagtacttacgcaaaattaatctgctcctcaatgagatgagcactccattt

SEQ ID NO: 1468 - DNA, 443 bp, Homo sapiens
  misc_feature 333: n = A,T,C or G
ctgactctgarggtttacattkgacsactgascaagtggcaataatggcygtgttattgakgacagaaggctgtgttaktgtgcctgactscatmtgwtcaaaagggtgaatgttatgttggcagctccrcattctaggcctaaggtttggagggcacagggaatgctgacaggccataatacctgggcaggggggctgccctgatgatgtcatcagaaccatgaccacagggctacatgtccccccaaggatgggagacagggaagacaaagggtcaggtaatagggataggtggataaaacaaagagtagaagttgggagtatagtasggnacakaggatgagggctcasgtggaggtggggacataaagcatmcaggaataaaatgtgaccttaaaatmctaaggaatggctagtatccagagtaataccatggattcat

SEQ ID NO: 1469 - DNA, 409 bp, Homo sapiens
ctggaggctgctgtggggaccacactgatcctggagaaaagggatggagctgaaaaagatggaatgcttgcagagcatgacctgaggagggaggaacgtggtcaactcacacctgcctcttcctgcagcctcacctctacctgcccccatcataagggcactgagcccttcccaggctggatactaagcacaaagcccatagcactgggctctgatggctgctccactgggttacagaatcacagccctcatgatcattctcagtgagggctctggattgagagggaggccctgggaggagagaagggggcagagtcttccctaccaggtttctacacccccgccaggctgcccatcagggcccagggagcccccagaggactttattcggaccaagcagagctcacag

SEQ ID NO: 1470 - DNA, 598 bp, Homo sapiens
  misc_feature 585: n = A,T,C or G
aaatcacttctatcttctgtacttaagaactcaagtatagaaataaactgtgggctgaagtaacattgtaacctgctcccaacatgactgcataggtgtctaaggttaagtgtgaagattactgtgaggactcaagttacttgactaatcaatcccatttgaatttcaatccaagcagcgtattttacacacacctgaaggaaatatcttcagtgtgttcatgtgtgtgtctatgtgcatgtatgtgtaggggataggtgtaattagggaagggctgaccgaacaacattgataagtacatgctagaagtctgctgttgttggtaacacagaaacatacacagtcttcatattcaaagtcttcacggggatgtcttctgtaatttcctgcgtttgggtctcattcagaaacagctttagcttcctgctccgaaggccaaacaccttggctgcttcatacagaagaccttggtgggtgagtccattctgcccaagtgggttttcaagcaggagagtgcccactgtccccattaaacactcttgtggctctgcattcaggagctgtaggttgatatactgacaaagnagagtactagaac

SEQ ID NO: 1471 - DNA, 118 bp, Homo sapiens
aaaaatatatatacaagctaacacacacagctatcagcactaatgcccccccctcaacttttcctttttcttatagaaaatggaaagcttacaatacctcctccatcaaagcggcagg

SEQ ID NO: 1472 - DNA, 246 bp, Homo sapiens
aaaggcagacactgagtcagtattaatagattaactaaactgcactgtaatttagataaaattactgtgtctcactgtgtattacatgcaaaatccacataaattgtcatttaaccaacagtactgcacgagcgaacatctcgatatatgaaaactgcatcatcaattcaacgttttggtacttgaaactgcatcataaatgcaacattgtcatatgtgaaaacgacaccctaagtccttcttttt

SEQ ID NO: 1473 - DNA, 457 bp, Homo sapiens
gccctgcctcgttactgggaagcaccacccacaattatgggcctacccagcctgggccctgtgtgccagcacttactcttttgtaaagcacctgttaaaatgaaggacagatttatcaccttgattacagcggtgatgggacctgatcccagcagtcacaagtcacaggggaaggtccctgaggaccttcaggagggcggttggtccaggacccacacctgctctcttcatgtttcctgatcccgccctgggtctgcagtcacacatttctggaaacttctctgaggtccaagacttggaggttcctctaggaccttaaggccctgactcctttctggtatctcacaggacattttcttcccacagatagaaaaggagggagctactctcaggctgcaagcagtgacagtgcccagggctctgatgtgtctctcacagcttgtaaagtgtgagacag

SEQ ID NO: 1474 - DNA, 284 bp, Homo sapiens
ccagttgggtcactggaaaacatggcaaaatattgaaaatgagggattaggtgagagtgtagcaactgaacactaaatgcttgatccaggtgccattccctggatactgacagggagacacattgtccaggtaatactggaaaaatactttctatagtgtaaaccacaaataaaattccaagcccctcaactatttgaatgcacccctcctctcagccagggtcattccaaagttaacctgaaaaactggttcagaccatgatgggaagtaggggtcagatagg

SEQ ID NO: 1475 - DNA, 307 bp, Homo sapiens
ctgacagcactcactgggcggatccaggaggccggcacggaggtggtcaaggctaaagccggagcaggctctgccaccctctccatggcgtatgccggcgcccgctttgtcttctcccttgtggatgcaatgaatggagaggaaggtgttgtggaatgttccttcgttaagtcacaggaaacggaatgtacctacttctccacaccgctgctgcttgggaaaaagggcatcgagaagaacctgggcatcggcaaagtctcctcttttgaggagaagatgatctcggatgccatccccgagctgaagg

SEQ ID NO: 1476 - DNA, 143 bp, Homo sapiens
ctgtgaggcccagatgttcacagttgactcacagatgtcctacacagtgcccattatggcttttgcttttgtctgccaccctgaggtgctgcccatctatacggagctctgccggccctccaagcgcaggatgcaggccgtgg

SEQ ID NO: 1477 - DNA, 317 bp, Homo sapiens
ccttctggcaagccctggatgaaagcatggacctcttggaaggtataactggctttgaagactctgtccgaaagtttatctgccatgttgtgggtatcacttaccagcacattgaccgctggctgctggccgagatgctcggggatctgtcggacagccagctaaaggtgtggatgagcaaatacggctggagtgccgacgagtcggggcagatcttcatctgtagccaagaagagagcattaaacccaagaacattgtggagaagattgactttgacagtgtgtccagcatcatggcctcctcccagtaacttcag

SEQ ID NO: 1478 - DNA, 376 bp, Homo sapiens
aaagctgccagattgcaacagaaagactaggccctgtctaggaaatgggaatttacatcctaaaacctagttgttcatttgtttagagtatctatagcaaaataggttacatgtagtttgaaataaggtatcctgagttacttcggcaacaagttcttttacccttacccgtggtatttgaaaaaaatcaaggtaactgtctgaatactttaatatcagcttgttttgtgaattctctgaatactgtcaacactcttatctaagtttgcctttatgatgcagtggcagcattttgaattacttttcaaagaatactgttcatatgcattgtttttgtgtttcaaactaaatacaggcagttttgtgccagacctgc

SEQ ID NO: 1479 - DNA, 265 bp, Homo sapiens
ctgaagaaggaactgaatgaactggtcagtgctattgaagaacattttttccagccacagaagtacaatctgcagccaaaagcagactaaaatagtccagccttgggtatacttgcatttacctacaattaagctgggtttaacttgttaagcaatatttttaagggccaaatgattcaaaacatcacaggtatttatgtgttttacaaagacctacattcctcattgtttcatgtttgacctttaaggtgaaaaaagaaaatgg

SEQ ID NO: 1480 - DNA, 216 bp, Homo sapiens
ctcaacacctttcttaagcccacatcataacctgtcttgcataactttgtgagtgcccaacgtttcactgtacaagattgtagagctgcatgcttcttaagaataaatccacactttaggtaccagtaaatccatgcaatgcctcagacgctataaccaaataatgcctggaaaaccgacatgaatttatgtgaagcataagcctttaattttttt

SEQ ID NO: 1481 - DNA, 530 bp, Homo sapiens
  misc_feature 502, 518: n = A,T,C or G
ccattggcgtaaaccttgaagcgatccaagccacagcgaatggacagatcaaagaactgtccgggaccaaatgggttgtgggtgatcttcttctcctcggatccccacgagccattcagaaggctgttccggaccacggtaccgttgcccatgcggggattaatgtgcagagctatgtcccctgaggagcccaccttgaagttgatagcaaagctcttgcctgtgggaggcacatagcccttgatgatgatggttcttcgagctgtgagccctccttgcagcctcccgaaatatggcacaggctgtgggaagagaacggggggtcccattctctctcagcttagcagagccagatgtgggaagaaattttctttttcttttcttttctttcctgtctttttttcttataagagatggggtcttactctgtcacccaggctggagtgcagtggcatgatcaagcctcactgcagcctcaaactgctgggctcaagcaatcctnccatctcagcctcccnaagtgctgggat

SEQ ID NO: 1482 - DNA, 213 bp, Homo sapiens
gggtggtggtgtagagggtgatggtagatgtggcgggttttaggggctccttggtgaagagttttatggcgtcagcgaagggttgtagtagcccgtaggggcctacaacgttggggcctttgcgtagttgtatatagcctagaatttttcgttcggtaagcattaggaatgccattgcgattagaatgggtacaatgaggagtaggaggttgg

SEQ ID NO: 1483 - DNA, 279 bp, Homo sapiens
ccaattgatttgatggtaagggagggatcgttgacctcgtctgttatgtaaaggatgcgtagggatgggagggcgatgaggactaggatgatggcgggcaggatagttcagacggtttctatttcctgagcgtctgagatgttagtattagttagttttgttgtgagtgttagtttgattagtcattgttgggtggtgattagtcggttgttgatgagatatttggaggtggggatcaatagagggggaaatagaatgatcagtactgcggcgggtagg

SEQ ID NO: 1484 - DNA, 139 bp, Homo sapiens
aaaatatataaatgcagacctctcaaatttccttcaatcaggccagaaattatcacaaaaattataatcacagttacaaacagaatgagtggaatgtttgtaagtttaggacaaccaaaaaagccccatgtaacttttt

SEQ ID NO: 1485 - DNA, 262 bp, Homo sapiens
tgcatcagcttatagttactatcattatggccggaagactgttcaggtgataaaagactgatgaaagtcatccctcactgttagtaaggaagcagtatacatcaatgggaacagggcccatggaaatgtacaggagtttccctattttggtgttcagcttgaaaaaggacttgtcagaatcaactgtgtcatcaaaatttaagtaatgtgcattgaaaataaggttgatcatgggaatatgcagaatttccaacgtattttt

SEQ ID NO: 1486 - DNA, 561 bp, Homo sapiens
ctgcctttcatcggatttacctactatagagaaaatttattattaagtgactctccatcttgtagagaaaatgattccatacaatcaaggaaaaatgaagaaagtcaagagattcagaaaaaactgtatacattagaagaacatcttagcaatgagatgcaagccaaagaggaactggaacagaagtgcaaatctgttaatactcgcctagaaaaaacagcaaaggagctagaagaggagattaccttacggaaaagtgtggaatcagcattaagacagttagaaagagaaaaggcgcttcttcagcacaaaaatgcagaatatcagaggaaagctgatcatgaagcagacaaaaaacgaaatttggaaaatgatgttaacagcttaaaagatcaacttgaagatttgaaaaaaagaaatcaaaactctcaaatatccactgagaaagtgaatcaactccagagacaactggatgaaaccaatgctttactgcgaacagagtctgatactgcagcccggttaaggaaaacccaggtagaaagttcaaaacagattcagcag

SEQ ID NO: 1487 - DNA, 581 bp, Homo sapiens
  misc_feature 534: n = A,T,C or G
ccacagggtgaaatacaaacctatcttagccttggaaagccacccagattttcctcttccagagtaaattcctcatgtcacttttgcccaggggccagtcctcattttctagattaggataacagttggagacgcatagagggtcttgtgtttgccacaagaccactgcaccaaaaaatgctttctatcctctgcatctaagagcaataaaaaggttacacataatccagggactacatttccatcagaggactctctcccatcatggttttgctgagattaattaaaattcacaaaagtattgctcagtttaattagacactgctgagagttagcaaaatgatgtttcaaaaaagtgcacttcagaaatgcctacgggctggcgataaagtaaggactctgcatcccagtaattaagttttgattgctaatgaggaatcccagacacctccctgtaaaagccagcatgcgaggtggggacaaacccctaaaattcagattttatacatgggccacctgtatggtcaatttttncaacaacactatgaccaaggcattctgatagctgtcaagattttctg

SEQ ID NO: 1488 - DNA, 310 bp, Homo sapiens
cctagsakatgkttgatgccaagaacatgatggcgtgcctgcgacccccgccatggccgctacctgacggttgccgccgtgttcaggggccgcatgtccatgaaggaggtggatgagcaaatgcttaatgtccaaaacaaaaacagcagctattttgttgagtggatccccaacaatgtgaaaacggctgtctgtgacatcccacctcgggggctaaaaatgtccgccaccttcattggcaacagcacggccatccaggagctgttcaagcgcatctccgagcagttcacggccatgttccggcgcaagg

SEQ ID NO: 1489 - DNA, 279 bp, Homo sapiens
tgtagaccacaaaatccacttttatttggtagtttttacatctatgaccaaatagtattgggttgacacagtaatctagagtttacctctgaaaaaaagtaatgtgagtctgtctaaccatattttcctaactcaacagtaggatcatgatggtaaggcaaatacaagttatttttaccatgattctcaaatgtgaattgaatgttacagtagcaaatacttttgacctcttgtgatgagtcagaactagaacttaattctttggctttcacatttttt

SEQ ID NO: 1490 - DNA, 241 bp, Homo sapiens
aaattatcgttttcctacttaaattttgtttagcttaagacttcttgggacatttgtaaaagcaggttaaatttaataaggtttctgattttttttgtaaccggagatagtttttacaagtgaaataacatttcagctaaataaaacatcgctaaataattgatatttgatgaaaatctgctttgtataatttctgtaaattatccttgttctgaaaaaggtgtaatgccctaatattttt

SEQ ID NO: 1491 - DNA, 176 bp, Homo sapiens
ctgaccaacgccccgcagggcggcctggcggaattcaaccccttctcagagacaaatgcagcgacaacagttcctgtcacccaactccctgggtcctcacagccagcggttctccagccatcagtggaaccaacccagccgaccccccaggccgtggtgtctgcagcccaggcagg

SEQ ID NO: 1492 - DNA, 469 bp, Homo sapiens
ccaagctgcaggggatttgggggatgtgggacctccaattcccagccccggcttcagctctttcccaggtgttgactccagctccagcttcagctccagctccaggtcgggccccagctccagccgcagcttaggcagcggaggttctgtgtcccagttgttttccaatttcaccggctccgtggatgaccgtgggacctgccagtgctctgtttccctgccagacaccacctttcccgtggacagagtggaacgcttggaattcacagctcatgttctttctcagaagtttgagaaagaactttctaaagtgagggaatatgtccaattaattagtgtgtatgaaaagaaactgttaaacctaactgtccgaattgacatcacggagaaggataccatttcttacactgaattggacttcgagctgatcaaggtagaagtgaaggagatggaaaaactggtcatacag

SEQ ID NO: 1493 - DNA, 161 bp, Homo sapiens
gtgaactcacaaagtataggcagatacatgcttgattttatcttctaatctacagataatacattagaataaaaatgtaatgaattcatacacctttcaaaaggaaaaactgatgaagtaacaataaagttataaatgataatgatcagatgaaataattt

SEQ ID NO: 1494 - DNA, 177 bp, Homo sapiens
aaaactctggtaattacttgtaacagtagaaaatagaagtcattcttattttagaaaaagtgacagaagcagtccagtaagattatatgtttctgtttctggtaaataccatatatgatcctcgaaatgataatatctccagaatattgttttcacccaaatttgagtagatatttt

SEQ ID NO: 1495 - DNA, 530 bp, Homo sapiens
aaaagaccattagtctgttctacctttcctgaagactgaggactgtaaaggatataaaggtttcactgaatactaagagcctgaaacaatgtttggctgatttgactaataaaggccagtctactattggactgtatagaggtgggaaggccaaactgaggaattatgtctgacagaagggaagaaatgaccgtggtggccttcttagaccctgtgggaaaggactctacctatccagtgaaagtgtctacctagaccaaaaggtgttttagtttcctgaatcggggcacgttgagtaaagctattatgtcagtcccgggtgggggcaaatccctgagcttgatgtgtagggaagggagggggcctgaataatccctgaggagtagtagaatagcagatggaacactgagaagttatttctttgaggatagatttccacaatggaaaggaaataagagtttctaaaaggcgggctagtggcttgtactatagcatagcctgcctttgctggtgtgtggcgattaggacct

SEQ ID NO: 1496 - DNA, 426 bp, Homo sapiens
aaagaaaatgggcagagaaacacaatataaatcaaagagtatgccactgtacaaggtttattatcattatcatggtccttaatgttactgaacctttactatagtaataaatacagttctatatttacacatcttataaaacatctcataaatgtattttttcaaatccaagttaaaacatctgatcaaaataaacatgcttatataaaaataaatctacctaacagccatttggtttggatgtattgaagctaatataggataatagaaggtaagaattaatactttgacttttcttatttaataacttgcttcttaaaatacctaacacagtattaatatggaataagcagagaagtaatgttcctaacatcaagtgggttatccagagagaacacagctaaaaccaagctaaataaacaggat

SEQ ID NO: 1497 - DNA, 291 bp, Homo sapiens
gcggtgctcggagtgtggtacttctcctagttgcagtcaggcttcatacgctattgtcctgcccgttagagcagccagcgggtacagaatggattttggaagagggagtcaccactggacctccaaggaagccacgtgcagacatctacaaccttcgatctcctgacgaaaactggcgatggaatatgagaggagccctctggaaagaaaaggacagaccctgtgctttcatgaaagtgaagatctggctgaaccagttccacaaggttactgtatacatagcctgagttt

SEQ ID NO: 1498 - DNA, 480 bp, Homo sapiens; identical to SEQ ID NO: 304

SEQ ID NO: 1499 - DNA, 239 bp, Homo sapiens
ctggagagaagagagactgagtgccacccatgagaactggtggctcctctgggagggaacctggatacagtgaggagaaaagggcactgtgaattagagccagatgcttaagtccaggtgagacaggttatgccatcttccaaagtgtctaattgcctcaggcgtgaaaccaattcctatttacttagcccagctccatggggtactgagatacatggggccgaaaaggggtaatatgg

SEQ ID NO: 1500 - DNA, 261 bp, Homo sapiens
aaatactttatatggtaaaaatacagcaaaaatagttttttgttccaagaggaaaatatatactgctatggtcacggttctaaggatgatttaagaagtctctggctcctcaactgtgcactgtagtgtaggctgacttcaaccacggcttctccagcttcagtcatttatcaaagctaagatcatactataaagatacatgaagaagcagagcaagtggaaaccaagcttgatcatggcttctttcatgtgtgacttcag

SEQ ID NO: 1501 - DNA, 169 bp, Homo sapiens
ccgagatcttcgcatcttccggatctttgaggggacaaatgacattcttcggctgtttgtggctctgcagggctgtatggacaaaggaaaggagctctctgggcttggcagtgctctaaagaatccctttgggaatgctggcctcctgctaggagaggcaggcaaacag

SEQ ID NO: 1502 - DNA, 141 bp, Homo sapiens
gaagttgtcatggacccagctttggcagcacagtatgagcacgacttagaggttgctcagacaactgctctcccggatgaggatgatgacctgtgagaatgaagctggagcccagcgtcagaagtctagttttataggcag

SEQ ID NO: 1503 - DNA, 338 bp, Homo sapiens
gtgccaacccaaaaattggttttatttttttcttaaaaaaaaaaaaagtctaccaaaggaatttgcatccagcagcagcacttagacctgccagccactgtcaccgagcgggtgcaagcactcggggtccctggagggcaagccctgcccacagaaagccaggagcagccctggcccccatcagccctgctagacgcaccgcctgaaggcacagctaaccacttcgcacacacccatgtaaccactgcactttccaatgccacagacaactcacattgttcaactcccttctcggggtgggacagacgagacaacagcacacaggcagccagccgtgg

SEQ ID NO: 1504 - DNA, 385 bp, Homo sapiens
aaatgttagaaacatctcagggctattattatttatctacaaagcagaaatcagccaaagacaaaggaaaaaagtaagctaatcagaacctgaagacctgaaataccacatgaaatgtaaacatttaactttttatttccaaaggatttcttgaagcctctctggagataatgacatcaccacacatactgttaaacaatcttttaatacctttggaattactctttataatttttatacttcaaattaagaaaaccgcccaatgttcaggcaactttggcattaacatttccaagaaagggacaaaaacaactattaatgcaacatcatgaagagattggggacaattgtgggtgtctataaagctctctttgaaaagctcttt

SEQ ID NO: 1505 - DNA, 377 bp, Homo sapiens
agcctatgaaggctgttgctatagttgcaagcaggaggataatgccgatgtttcaggtttctgagtagagaaatgatccgtaatataggcctcgcccgatgtgtaggaagaggcagataaagaatattgaggcgccattggcgtgaaggtggcggatgattcagccataatttacgtctcgagtgatgtgggcgattgatgaaaaggcggttgaggcgtctggtgagtagtgcatggctaggaatagtcctgtggtgatttggaggatcaggcaggcgccaaggagtgagccgaagtttcatcatgcggagatgttggatggggkgggaggtcgatgagtgagtggttaattaattttattagggggttaattttgc

SEQ ID NO: 1506 - DNA, 158 bp, Homo sapiens
ctgacacatcatcctctgatagcctgacccaagcattacaacttgcagcggccaatgagcccactttctttctgtacgctgagcaactggcccgcaaggaggtggagatcacatcactgaggaagcagaagcacaggctggaggtcgaggtgcatcag

SEQ ID NO: 1507 - DNA, 238 bp, Homo sapiens
aaattatgaaagaataatgcagactttttattgtttcttaactgactagaaagagccaccagcattactctgtgccttttggacatcagtttgtgtgttctgtaggaattgtgtgcattccattcacacagtatttctttaggatgctgtgatgatttgaattacaaatcctacagtcaatagctaaagacgaaaccttcatttcagaactctcatgaatattctttaagtgctattt

SEQ ID NO: 1508 - DNA, 333 bp, Homo sapiens
ctgtaaatacagatgaagctgtgctcactcacccaccgctcaccccctgctgtgtggcctggttcctaaccagtgccacggactggtactggtctgtggcctgggggtggggacccctgttttaagcagtttaagaattattctttttcagaatatctacctctactgggataagatcacgtttctttactgtgagcacacagtaggtgctcaataaatgcttgttgcaagaatgaatgaccggccgggcgcggtggctcaagcctgtaatcccagcactttgggaggctgaggcgggcagatcacgaggtcaggagatcgagaccatcctgg

SEQ ID NO: 1509 - DNA, 164 bp, Homo sapiens
ctgcttgccagcaaagatcagtctctgctgatcaggaggaattccttccttatcctggatcttggcctttacattttctatcgtatccgagggctcaacctcgagggtgatggtcttccccgtaagggttttcacgaaaatctgcattttggtggcggctccac

SEQ ID NO: 1510 - DNA, 383 bp, Homo sapiens
gccaccaagagcagggagacctcaagcaccaagctgacctttggaggtcaggacggacccagaatcaggcaggaatttggcaggaacatcagacattggaaggttagatgagactgaacaggtgagaaaactcttagggtccccagacagcattgagatctcacagaggggccccaagggcctgcgactccaggagctgagaccccccagggagggaggtgcctctagactgagacactcacaaagggaccccagttcagcaagggtcagaggaaggtctggagggagaagagagtaaagggccctgggtgggcaggaggctgaggagggagcctggggagagcaccagggcggggcatcaggccagtgcctggaaggtgtgg

SEQ ID NO: 1511 - DNA, 129 bp, Homo sapiens
caaaaatcgatggaatcatttccactgggaagattgaccttttgtatttatttgtggggtaaattaataagcattccagatgcttgcagcttcctgcatccaggagatgctgtgttccccgtgatgcag

SEQ ID NO: 1512 - DNA, 189 bp, Homo sapiens
cctcagagacgtggcatatcaatatgtgaaaaaggggtctcgaatttatttggaagggaaaatagactatggtgaatacatggataaaaataatgtgaggcgacaagcaacaacaatcatagctgataatattatatttctgagtgaccagacgaaagagaaggagtagaaaggatgattcttctttgg

SEQ ID NO: 1513 - DNA, 175 bp, Homo sapiens
cctgggctctggttttmkgaggagctggtttagcagacaaccgagctgatctcctctgtggctcatccttcacctttgctttatcacctttagcatctccttttgcctttctcttgggcatggtagcagcagtgttcgcaggtggcttgagcagtcctgttgggtgcttctgtcc

SEQ ID NO: 1514 - DNA, 157 bp, Homo sapiens
ccactcctctcacagcagacagcttcactccgctccagccccggtactgcggtctgtggtaatttacatgggaatgggatgagatctagtagttttagatccaacgcaattctgggaagggttggtaataaaccaaaactcaatctatgcagtattt

SEQ ID NO: 1515 - DNA, 271 bp, Homo sapiens
cctaggagagggcgggggctgctgtgatccgagagctccctgacgccccaaccttccccgaacgcagctaacgagctcgtgacatccgctgacatcgccaccggtctgctttggagggatctagcgagagtcacctaccccacccctactgccaggggaggggtcgttgcccccacgagggagagaaaaacaaggactataatgcacttcgcaaaatgtaaggggccggcttcacgccagcggggccttctgggactttgaattcaaccag

SEQ ID NO: 1516 - DNA, 274 bp, Homo sapiens
cctgtgggaagtttagctgaggacagggccaggaaaggtgatggacagtgggggtccgtcctggtcaccaggcccctgggtcctacccacctgcttggagctccccacccatcacacatgatgctgccaagccctctgggtattgtgggcgaataccttaggagagaagctgatgaactttgtttcttgaaatgcacagattccttggacgtccctgagaggtcagtcatgaaagtcaacttggttttctccccctcatttgggttcagaattt

SEQ ID NO: 1517 - DNA, 341 bp, Homo sapiens
aaaaatctcttagtttgaacagtagaagatgtaaataagcatagagactgttggcaagttatgtttatcacaaaacaaagaagaaggcacagagggtccctttgacccttgaacttgtggttactaatagtattaaggttggaaatcatgaggaaggacacagaacataaactgggatcttgaagacaggcatgttgataaaagtagccctgaagccttaatattagcaacatcgaagatgggaaagacaggattgatttatttgggaactaagtttacacattatatgtctcaatataaaacaaaagctatggctttagagtttaacaggttaaaaaaaa

SEQ ID NO: 1518 - DNA, 279 bp, Homo sapiens
ctgcagtctcagagagggtgacgatcacttcaagggcaagctggcgttgcatattgttgaggctagtgtctccacacaactttagacttagctgtagagttgcttccaagtgaggacgcaaatactttggaacagtatctgcaatctcaacgagggattttaggacagaatcatcattctggtagcacgagtcatttaccgcctgtaggaatcccggtagcaagtctgcaaaatgtttgaacagagcaacattatgctcatttgcaagtataaatgcag

SEQ ID NO: 1519 - DNA, 322 bp, Homo sapiens
ctgactaagagccctctggcacaaatggaagaagaaagaagggagcatgtagctaaaatgaagaagatggagatggagatggagcaggtgtttgagatgaaggtcaaagaaaaagttcaaaaactgaaggactctgaagctgagctccagcggcgccatgagcaaatgaaaaagaatttggaagcacagcacaaagaattggaggaaaaacgtcgtcagttcgaggatgagaaagcaaactgggaagctcaacaacgtattttagaacaacagaactcttcaagaaccttggaaaagaacaagaagaaagggaagatctttt

SEQ ID NO: 1520 - DNA, 99 bp, Homo sapiens
aaaaagtgttagcattaatgttttattgtcacgcagatggcaactgggtttatgtcttcatattttatatttttgtaaattaaaaaaattacaagtttt

SEQ ID NO: 1521 - DNA, 124 bp, Homo sapiens
ccagggctaccttatcaaggacggcaagctgatcaagaacaatgcctccactgactatgacctatctgacaagagcatcaaccctctgggtggctttgtccactatggtgaagtgaccaatgac

SEQ ID NO: 1522 - DNA, 466 bp, Homo sapiens
ctgcagggccacattcccacactgcaaacccctccacccaccctcaactcacacacaccctggatcagcrggtctaggctgaaagagagaacagtgaggttcccagggtggcaggtgggtatgacaggcaccataacccaacctgctcaaaaccctaagttagcaaaggaagacagaagactggcttgcctgcccattcccctccccccacccccaacagcagcctcacatccctgatcagtaacactgtgattctgasgtgccaaraggaggggctttaccagcccctgggtgattactaccaaacggcccagaggccakagagagagggcaggaatttgccccactacctgctcagtattagccaagctgctgccttcagcttgtgcctgtgggtgcctccagcccctctcccttccagaacaggtatggctggaaaccagtcctcctgacagaagaagtcagt

SEQ ID NO: 1523 - DNA, 207 bp, Homo sapiens
ccacccgcctctccagacccctgtcacggctcccaggaaaaaccctaagtgcctgtgatagagaaaatggagcaagacgcccactattgcttggttctacttcctttatcccgattggccgtcggacttatgccagtgcggcggagccggttggcagcaaagctgtcctggtcacaggctgtgactctggatttgggttctcattgg

SEQ ID NO: 1524 - DNA, 235 bp, Homo sapiens
aaaaatgaataaatgttaaataccaactttcactattacagaaaggggcagctagaaaagtttactctgtgcacaagactgcgacaccccgctcgtagaagctgcgaggatcctcctttgtagcaatttcgaagtccacggtgaagatgaggtctgcacgggtgaagttcaggtagacaggtaaggttaccacactggccttcttctcggtgtttgtctgcttgacccagcgcag

SEQ ID NO: 1525 - DNA, 250 bp, Homo sapiens
aaaatatgactcctactttttttattttgcaactcctctgttctgtcagagttgttatatacaggagtgtcttatgttactaaaacattccagccaaagaatttcagatgtgagataatgatgtttcatcaataaaaagctataatggttagttactcagaaggagaaacagtgagtgtcttcaagtgaattgttcacctaaacaattttattttcatattatccacataactttttctatgttatattt

SEQ ID NO: 1526 - DNA, 166 bp, Homo sapiens
ctgcctcctctgtcatggcagacagcaccgtgatcaggatctcttctccacagtcgtacttctgctcaatctccttgccaaggtctccctcagggagacgaaggtcctctcgtacctccccgctgtcctggagcagtgataggcacccatcctggatgccaatcag

SEQ ID NO: 1527 - DNA, 215 bp, Homo sapiens
ccaaggtagtggtacagcagtttacaacaacaacatgtacgtcaacatgtacaacaccgggaatattgccagagttaacctgaccaccaacacgattgctgtgactcaaactctccctaatgctgcctataataaccgcttttcatatgctaatgttgcttggcaagatattgactttgctgtggatgagaatggattgtgggttatttattcaa

SEQ ID NO: 1528 - DNA, 183 bp, Homo sapiens
ccatcctgcaggactgcccgtccctgcggccccccatcgaccacctgtgtgagctgctgccgcgcctgcaggcccgctactactccatcgcctcatcctccaaggtccaccccaactctgtgcacatctgtgcggtggttgtggagtacgagaccaaggccggccgcatcaacaagggcgtgg

SEQ ID NO: 1529 - DNA, 634 bp, Homo sapiens
aaatgattagtccaggggtagaaaagatgaggatggtttcatcatactttgaaaaggaaactcccactggagctaaaacaaacttacagtccaggttataagaatccaagttacatagtaaattattaactattattttcataccaagttcatgcttaggcaataagaaaatcctgtttgcagcattaattacatgtaattcagtttccaggcacatagttagaggtcacacacaggcagagaaagaacaaatgccagcccagtcatctcactgcctcagtccagcagccagtggcccaggacttcatctacactgtctatctgcttcccagccacttaagccccacgagggaaggcaaggcagctagccctggaggtgagaagacaccgttgatccaccagcgcaggtgcagggccctctgcagatttgttccaccagtgtatctcccatagaaaatgggatttgaaatcacaacttaaaccaagtgggtaatatcctgaccgggggccctaagaaactggcattcttgcattggaaatgaattgcactattcagatgcacagcactccttttgcacaaagttgtgttctgaggtgccaggacatccaagcacttgcagtgtcaatgtcgtgt

SEQ ID NO: 1530 - DNA, 242 bp, Homo sapiens
ccatcttgttgctgcttggttagatcatatagctaatgaattaggcaggggagctattttttgaagatgatgaactaaatgttgaagacaagtttgagatctgtaaaatgtgattttttacttccacttataatacttgtgattggggaggtttgtggaaattcaattatgatgaaaaacctatcttttttgtaatgttggcatacttggggaatttagtggcaaatacattccccagcagg

SEQ ID NO: 1531 - DNA, 453 bp, Homo sapiens
ctggagacacccacttgggtggagaagattttgacaaccgaatggtcaaccattttattgctgagtttaagcgcaagcataagaaggacatcagtgagaacaagagagctgtaagacgcctccgtactgcttgtgaacgtgctaagcgtaccctctcttccagcacccaggccagtattgagatcgattctctctatgaaggaatcgacttctatgcctccattacccgtgcccgatttgaagaactgaatgctgacctgttccgtggcaccctggacccagtagagaaagcccttcgagatgccaaactagacaagtcacagattcatgatattgtcctggttggtggttctactcgtatccccaagattcagaagcttctccaagacttcttcaatggaaaagaactgaataagagcatcaaccctgatgaagctgttgcttatggtgcag

SEQ ID NO: 1532 - DNA, 411 bp, Homo sapiens
ccattttaaggtcttcggcagagcagctccccgactccagcccgcaagccatgcccatccgcttcagcacttctatgtcatcgtggattaacagatactcaaatttgtcattggagatgctgcagtcgatgaccgtcttcttgctggtgttgacgatgatgaagggcaggtggatgactgagttgggtggcggtggccggctggcccgctgctccgcatgccggtttctctgcaccaggttcttgaaggcaatttgctgtagaataagttcttgaagttgagactgtttctgttttattctttcaagtctcctctgtctttccacctctaagttctgacattcctgagccgagttggtgggcagaccaatccacttgatctccttcttctccttggagatgatgttcatgg

SEQ ID NO: 1533 - DNA, 320 bp, Homo sapiens
aaagctgtttatggcttgccatcagcattattctggtaggcttgttagtgttaaaatctatttgatttttttttttttttgcctcttaaagtctaattttaggatggatgaattcagatgtttaccagagtgtgtattttacataatgttcttgattaaaaagacttgtttgtaaattatccgttgtttttgcatatgcccagttgatgtgataaaattttcattgtcttgccatataaagccttggttatcaacaggtggaatgtagatattgtaaagctttttgtgaattaaaagtgcaaaataaagcaaccacattt

SEQ ID NO: 1534 - DNA, 344 bp, Homo sapiens
cctgctgtccaagcagagcacaaatgggttcctccgggacccctggtcctttttccagacgaggctgtggcactggtggaaagggagggagaatggagcctggcccttgtgtgtacaacaggaaatgcacctcaggacacagcaggagtcagcgggagggcacagacctgccccctgccaggcagaaaatgggcctcctcaagcacaaaagtgaccaagtacaattttcagttgctaaaacaagaaaaggcttcagctagtttcatttccatgtgtagttattttctcttttgaataagcaaaaccaagctaagctgtgtcagccaacttcatcctgaccaagg

SEQ ID NO: 1535 - DNA, 92 bp, Homo sapiens
ccacgatgctcagataggacatccagggtagctgctccagcagtgctagcgcgatggtcatgagtatggcacaacccgccatgccagcgagg

SEQ ID NO: 1536 - DNA, 537 bp, Homo sapiens
ctgtgaaaagtctgctgcaggagggcatttacctcatcctggacctctgcatcgagcctgacgtccagttcctgcgggcctcgctgcagccgggaatgagagacatctttaaggagctctataatgactatctcaagtaccacaaggccaaacatgaaggagagaaaagatatacggcctaaggctatgggacagaagtgccgccagtgacactgtccagaggctttggctgcatggtctgaaagagctggagaatgaaagacttaagatgttctaattcgtagtattggtatacatagaaaatcctttggggtttatgtagtatattttgatgtattttacatcgtgtttttcttactattttttaatacatagttttatgcagtaagtattgcaatagaatcctgaaaattgaccctgggatgagattaattcaatagaaaaattgctgactcttgggacctttctgtgtttggttctcgtcttggctcagtggtttggtgttccctcgtctgcactggaaactacataaaactt

SEQ ID NO: 1537 - DNA, 211 bp, Homo sapiens
tctgccgactgcttctcactcactggctgggaccctgccactccagttctcttccttacgtccatctcaggctctgcagagtccgtgcctagtagctcactccgcatctcgctggtgtaccgcgcccgtgactgcagatgcaccgtctttgtggcgggcactcgctctctggctgtggttggcacacggccaggggccaggaactggttgg

SEQ ID NO: 1538 - DNA, 303 bp, Homo sapiens
gctagcatttattgttatctaataaagaccttggagcatatgtgcaacttatgagtgtatcagttgttgcatgtaatttttgcctttgtttaagcctggaacttgtaagaaaatgaaaatttaatttttttttctaggacgagctatagaaaagctattgagagtatctagttaatcagtgcagtagttggaaaccttgctggtgtatgtgatgtgcttctgtgcttttgaatgactttatcatctagtctttgtctatttttcctttgatgttcaagtcctagtctataggattggcagttt

SEQ ID NO: 1539 - DNA, 282 bp, Homo sapiens
aaaacaaaacaaaacagaaaaatcaaaataacattgactcttccaaccactgacatgttgtttaataatctaagcggcagtcctggaggctaccagacttactgagttctacctgagaaacagccaagcaaagtgtgagagaagggttaagactggcttacaatgagatgcttcaaatgaaaagggaattatgagtaaaattgaactttgatgggggattcagttctggaaaagaatttggtattttccagtctgctaggaccaattaccttgaaatatttt

SEQ ID NO: 1540 - DNA, 589 bp, Homo sapiens
aaaggcagtaatttttgaaatagttaatgcaactgttgctaacacaataataatagtactcctggcttcacatactaacctggacttccgatcaagtgctgattagcccagtaagggaggtcaccaaaaaacccaaatccatttcagtcatgtctagtcttgtaccctccattctccttttttagcatttgaagacaacgggttgagttggcagatattgtttatggacccctgaggttgtttttaccgattcaatctcagttttattgaattcttgataacaggaataggatttgcagggagagcagggatatcagaaaggtctgtactggatgttttctgagaggccaacagagaagccgctgtctgaatagtttctgattgagttgtacttgtctctgtatcaagttgttcctttgcttctgttttatcatgtccactcaaagcaagacagttagcatcttcacttgtttcatcctcttctgttttggttttcttgggactctcttctttatgaggtgaggatgtcctcttgactcctactataggagtaggtatttttgttgctgcatttcctgaagttgctgca

SEQ ID NO: 1541 - DNA, 226 bp, Homo sapiens
aaaaaaaatacagattaccaatttcaagtgctgccagctaaaataactgttttaacgggtatcttttgtttgttcttttcacttaattattttattgtgctttgcatctccaggcagttctctcacatttgggtaaaatgtttagcaggctgtaaacttaaggaaagggtaaaataaaattttctggagaggaacttggaatttgagggagattttatataccttt

SEQ ID NO: 1542 - DNA, 185 bp, Homo sapiens
aaaaatcagatgccttttggaagttgtatgtttatctgagcaataactaaattttatttcttcttcggttgttgaggtgtgttaaatttgaagaaaataatatctccatcttcaacaatataatttctgccttgttgtctgtactttccagcagccttgactgcattttcagaaccttcctcttt

SEQ ID NO: 1543 - DNA, 336 bp, Homo sapiens
cctaatcgccacacaccagcaaaggcaggttatgctatagtacaagccactagcccacctctcagaacctctcatttcctttccatcgtggaaatctatcctcaaggaaataacttctcagtgttccatctgctattctactactcctcagggattattcaggccccctcccttccctacacatcaggctggaggatttgccccacccaggactggcaaattacctttactcaacatgccctgattcaggaaactaaaatacctcttagtctaaatagacactttcactgaataaagtaaaggcctttcctacagggtctgagaaggtcaccacag

SEQ ID NO: 1544 - DNA, 363 bp, Homo sapiens
aaagttgaactaagattctatcttggacaaccagctatcaccaggctcggtaggtttgtcgcctctacctataaatcttcccactattttgctacatagacgggtgtgctcttttagctgttcttaggtagctcgtctggtttcgggggtcttagctttggctctccttgcaaagttatttctagttaattcattatgcagaaggtataggggttagtccttgctatattatgcttggctataatttttcatctttcccttgcggtactatatctattgcgccaggtttcaatttctatcgcctatactttatttgggtaaatggtttggctaaggttgtctggtagtaaggtggagtgggtt

SEQ ID NO: 1545 - DNA, 376 bp, Homo sapiens
ctgcttcaggaaaaccaccctcttgcccctgtggcgtccagtgaggatgatcagaatggtcccgggggtaatgctggctcgcagttttctcacgtgctgactgaagggttttttgccgtggctcaacagctttcgaggcacatcttcagtaggataatatctaggcattttgcgaagtttaaccacccgggtaccgccgttcttgtcaccaccaactggttttgtaacagttgcgagaaccttctccttctttttcttttcaaccttggatttagcggctgagtacttcctcttgtacatggcctttctggaatacatggcagatcgggaatacctgccaattcctctgacaaggacagggttgcggctgcaatgg

SEQ ID NO: 1546 - DNA, 327 bp, Homo sapiens
ctggttaatcatcagagaattcatacaggagagaagccttatcgatgcattgaatgtgggaaagctttctcacagaagtcacagctcatcaatcatcagagaactcatacagtaaaaaaatcctaggaatacagttaatagtagtctttgacagatcatcttggacttcaggaaatgcaattatgataacgtttgtagacagtcacgttatgttaggtgtctgtactccatgaggatgagaactctaaatgaggtggtgtatggaaagccgatcataattcatagagtagagtgaacctatgactgcagtggatctcaaaaactttt

SEQ ID NO: 1547 - DNA, 550 bp, Homo sapiens
ccaaaaaaaaagagtcttctcccccctcccccttttggtgatgtgatcatacaggagacaggcacaaggttaacagagaagggtgaagggggaacaatgggaaccacagctaggaccagacaatgttccacaggcaaggggagcgtgaaagaccaagagtggaactaacaccgacagggatctggatgtgaaggaaacatggcaaagtgaatcagagggaaaaaaaaaaaatcacacagggagatggctgctcacttcccacaacccccagtttgcaggggagtgggaatagaggttaagtagtcctaaccctaccttcaaagatcaggataggtggtaaaaatattccaagtggaaggacgggttgtgggtgtgtacatggcatgggagagcagacagggaagggtaccaaggggcatgaggaggggaacctgagcagccacagccaggttactgcagtgaaagagtcaaaacagagaagaccaaatgcagatgaaacaaaaaatcagtctcttaagttctgggtgagaaaggaaaggtgttctgccag

SEQ ID NO: 1548 - DNA, 266 bp, Homo sapiens
ccatggctaggtttatagatagttgggtggttggtgtaaatgagtgaggcaggagtccgaggaggttagttgtggcaataaaaatgattaaggatactagtataagagatcaggttcgtcctttagtgttgtgtatggttatcatttgttttgaggttagtttgattagtcattgttgggtggtgattagtcggttgttgatgagatatttggaggtggggatcaatagagggggaaatagaatgatcagtactgcggcgggtagg

SEQ ID NO: 1549 - DNA, 193 bp, Homo sapiens
aaaatacttctttaggatgttattcagccatcaaaaaaaaacccaactaaaatgtcttaccagtaaagtattattaaaagcctcatttgtggagattcgctgacttccttggttaagctgtcttgtatttacttaatttgtcccctcaaccaggtgttttcttttcagcctgttactgtcctgtgccattttt

SEQ ID NO: 1550 - DNA, 207 bp, Homo sapiens
ccttccagtacgagtttggagccatgtatgcatggatgctgtgtgtcttcactgtcatcatggcctacagcatcacttgtcccatcatcgcgccatttggcctcatctacatcctgctcaagcacatggtggaccggcacaacctctacttcgtctacctcccagccaagctggagaaggggatccactttgccgctgtgaaccagg

SEQ ID NO: 1551 - DNA, 518 bp, Homo sapiens
ccaattcgattcggagggtcttcatcgctgaggttcccataatagccattgactgggttcagattgatgccaattcctcagtccttcatgatgaattcattgctcacaggcttggattaattcccctcattagtgatgacattgtggacaagctgcagtactctcgggactgcacatgtgaggagttctgccccgagtgctcggtggagttcaccctcgatgtgcggtgcaatgaagaccagacgcgacatgtcacgtctcgagacctcatctccaacagcccccgggtcattccggtgacatcccggaaccgagataatgaccccaatgactacgtggagcaggatgacatcctcatcgtcaagttgagaaagggccaggagctgagacttcgagcctatgccaaaaagggctttggcaaggagcatgccaagtggaaccctactgcaggggtggcttttgaatacgatccagacaatgccctgaggcacacagtgtaccccaagcccgaggaatgg

SEQ ID NO: 1552 - DNA, 109 bp, Homo sapiens
gtgaggctctctagtttaataaaaatcatggaaagactcttaatgcagactcttcttaagtgttaatagggattttttcagcttattttggttgcagtttccaattttt

SEQ ID NO: 1553 - DNA, 298 bp, Homo sapiens
cctcgaggggtttccacgtagcccacaatgcccacaaccaccatgggtggtgtctctacaatggtcacagcctccaccacctccttcttgttcaccttggatcccggcctgtcgacttcccgcacgatgtgagtcatgccagccttgtatcccaggaaggctgtgaggtggaccggcttggacgggtcatccttagggaagctcttcaccttcccacgatgcctgctgccgcgcttccgaggcaggaagccgagggacccatgtctgggagcggagaactttctgtgagacatcacgc

SEQ ID NO: 1554 - DNA, 396 bp, Homo sapiens
ccaagctgggccaccaagagcacttgggccacctgggccttctgggtctcaggactgtctggtcactgccccatcaacactgtgcctcatctttcccctaccttccccactgcgctcccgtccatgaggagcacagcgctggcgagctagacccagggaagagctgttccacaggggactgatcatttgaaaaaaatccctccccctcaaccatcactcctccaggtcaggccctgcccgcactcctcctgggcttcctgcctgggtgggggtgggacgagggaggggagagaggctttgtggaatctgagggcagccacctttcacctgtaggccccaagcaaagcattagcacctccaccatccccaaggcccatagaaatgcccacaggcaag

SEQ ID NO: 1555 - DNA, 452 bp, Homo sapiens
ccacaggttcctcctactacggtgttgtacggctgtgggaccggcgtcaaagggcctgcctgcacgccttcccgctgacgtcgactcccctcagcagccctgtgtactgcctgcgtctcaccaccaagcatctctatgctgccctgtcttacaacctccacgtcctggattttcaaaacccatgaccgtcagggccacccctgcctctgggccagggaaaccagctactcagggacttctcttgcctggagggtgcagtgatagctcctcctcactgccccactgtgctcctgggcctgtgaccccagtgctcaggcaccttgcactagaggcttctgactcctgggactttggagcttaccagagatgcagtccctcccaggaacctgttggagaggcaggacctgctgctttagagtgcggctgaacccgggccttgcgtccctgtttgg

SEQ ID NO: 1556 - DNA, 344 bp, Homo sapiens
cctgctgtccaagcagagcacaaatgggttcctccgggacccctggtcctttttccagacgaggctgtggcactggtggaaagggagggagaatggagcctggcccttgtgtgtacaacaggaaatgcgcctcaggacacagcaggagtcagcgggagggcacagacctgccccctgccaggcagaaaatgggcctcctcaagcacaaaagtgaccaagtacaattttcagttgctaaaacaagaaaaggcttcagctagtttcatttccatgtgtagttattttctcttttgaataagcaaaaccaagctaagctgtgtcagccaacttcatcctgaccaagg

SEQ ID NO: 1557 - DNA, 345 bp, Homo sapiens
aaatataatttaagaacccctccaagcaccggcgtccgtttctgggttccaccaccaactaccgcccttttcactacctcaccccacaccccttcataggacacagcttgggggtcccaggcggggtccggggatgtgggatgaccaaggcactgttctggaaacagacatgatgatgggcccctgtttcaacttgggcaaaggaggccatagtgaaacaggttccctccaacacaaagttatgacaaggacggtagaaaaacaaaacgaagaaacaaaaagggaacggggagaaaaattaagaccaaaaacaaaactcaaaaaccttcaatatgaaggcagcag

SEQ ID NO: 1558 - DNA, 315 bp, Homo sapiens
gagaagaaagctagaactaatgcaaaagaaagctgtctgatcctgtttccttcatgttttgagtttgagtgtgtgtgtgcatgaggcatatcattaatagtatgtggttacatttaaccatttttctgtttgcccccattcactttgtcaggaaaccttggcctctgctaaggtgtatttggtccttgagaagtgggagcaccctacagggacactatcactcatgctggtggcattgtttacagctagaaagctgcactggtgctaatgccccttggggaaatggggctgtgaggaggaggattataacttagg

SEQ ID NO: 1559 - DNA, 247 bp, Homo sapiens
aaaggaagtaactacatggagtctaatcgagacattcatgagttacatctcattattagccttagtaatgtaagaaaacaattctcaacaaaactggagtccacagttgtcaagtatgctttctcaggcacgggtaggtaaaagtctggagaaatgggttctctccatgcccaatgacaaagcaagacggtcctaggtttgaggttaagagcaggtcccattgccgggcggtatccgcagctcacag

SEQ ID NO: 1560 - DNA, 372 bp, Homo sapiens
aaatactgggggccattaagagtggatgtagctaagagcttagctaacattgccttttcactctatttttctcagatattgtaagcattctgtttttcaatattgtagttaattttttggctttcaacagcagccctagtaatggtggagttgttaattaatgtgtatattgtactgaatttctgtcagttaaggggttcactgctttggtggaaattggtggaaattgctagcaggttccacgatgtttatttttttctccatgttgtatatcattaccatttcacatacgcgtttctatttttcttcctctcctcctgatctccttaaaaatgaatctagagttggtggctttttccccctcctctttgg

SEQ ID NO: 1561 - DNA, 111 bp, Homo sapiens
ccaattgatttgatggtaagggaggggtcgttgacctcgtctgttatgtaaaggatgctgtasggatgggagggcgatgasgactargatgatggcsgscaggatagttca

SEQ ID NO: 1562 - DNA, 577 bp, Homo sapiens
ctggatttccagttgcccatcagatttaatcttacttatgtaagccatgatggtgatgataagaaaaggccagtgattgttcatcgagccatcttgggatcagtggaaagaatgattgctatcctcacagaaaactatgggggcaaatggcccttttggctgtcccctcgccaggtaatggtagttccagtgggaccaacctgtgatgaatatgcccaaaaggtacgacaacaattccacgatgccaaattcatggcagacattgatctggatccaggctgtacattgaataaaaagattcgaaatgcgcagttagcacagtataacttcattttagttgttggtgaaaaagagaaaatcagtggcactgttaatatccgcacaagagacaataaggtccacggggaacgcaccatttctgaaactatcgagcggctacagcagctcaaagagttccgcagcaaacaggcagaagaagaattttaatgaaaaaattacccagattggctccatggaaaaggaggaacagcgtttccgtaaaattgactttgtactctgaaaacgtcaatttatattg

SEQ ID NO: 1563 - DNA, 403 bp, Homo sapiens
ccaggtcatcaccattggcaatgagcggttccggtgtccggaggcgctgttccagccttccttcctgggtatggaatcttgcggcatccacgagaccaccttcaactccatcatgaagtgtgacgtggacatccgcaaagacctgtacgccaacacggtgctgtcgggcggcaccaccatgtatccgggcattgccgacaggatgcagaaggagatcaccgccctggcgcccagcaccatgaagatcaagatcatcgcacccccagagcgcaagtactcggtgtggatcggtggctccatcctggcctcactgtccaccttccagcagatgtggattagcaagcaggagtacgacgagtcgggcccctccatcgtccaccgcaaatgcttctaacggactcag

SEQ ID NO: 1564 - DNA, 271 bp, Homo sapiens
ctgaagtgtggtgtcattgagtttactaatcaccatgttaccagtgctggcttcagttgaataaataacccacaatccattctcatccacagcaaagtcaatatcttgccaagcaacattagcatatgaaaagcggttattataggcagcattagggagagtttgagtcacagcaatcgtgttggtgatcaggttaactctggcaatattcccggtgttgtacatgttgacgtacatgttgttgttgtaaactgctgtaccactaccttgg

SEQ ID NO: 1565 - DNA, 258 bp, Homo sapiens
ctggaaagaccaatagctgactggaaagaagaaaggaagcagtttctattttcaatgtagaaaaaaaatctaatcgctacaaaggtcttgtaaaatcctcaaaacaaggtctagccaagtttattgcttggtaatttttttctttttttaaggggaaaaaaagcaagatttaatgtgaatactactggttacaactaatataacagcttgaaaaaatcatgacacagaagcataaatataatataaaaagacaatttt

SEQ ID NO: 1566 - DNA, 513 bp, Homo sapiens
cctggactctggcagaggcgcttttcccacctggtggctcccagggccgattgctggtcaaggagccagatatactcttaagacatgatgtgggttttatggggctccctggctctgggagtggcagtgaggcacgctgaggaagggctgccatcttggttttgtggcaacctgccgtatgaccgtgggcaagtgccttcccctgtttgggcatctgtcttctgctctgtaacatcaaggggctgggctggatgatctctcagcgtcttccaacctctatggtctaagacggccttccccactccagcactgcctcaaactgggatgatgaggacagtaaaagggcgttctttttttttttttaagacggagtctcgctctgttgcccaggctggagtgcagtggtgtactcttggctcactgcaacctccacttcccgggttcaagtgattctcctgcctcagcctcccgagtagctgggattagaggcgtgcaccaccatgcccggctaat

SEQ ID NO: 1567 - DNA, 153 bp, Homo sapiens
ctggcaagggacccaactgccctgcctgcctctagctcccagcattgctactgtgcaggccaagggtactgaagttagtcccactgtcccctgtccatgcatgttggagggaccaggccatcgtggtggggtgggacaggagtatagttgtgg

SEQ ID NO: 1568 - DNA, 181 bp, Homo sapiens
gatggctactctggagttgaggtgcgagttacaccaaccaggacagaaatcattatcttagccaccagaacacagaatgttcttggtgagaagggccggcggattcgggaactgactgctgtagttcagaagaggtttggctttccagagggcagtgtagagctttatgctgaaaaggtgg

SEQ ID NO: 1569 - DNA, 613 bp, Homo sapiens
ccatggaaaagggactggcctctctgaagagtgagatgagggaagtggaaggagagctggaaaggaaggagctggagtttgacacgaatatggatgcagtacagatggtgattacagaagcccagaaggttgataccagagccaagaacgctggggttacaatccaagacacactcaacacattagacggcctcctgcatctgatggaccagcctctcagtgtagatgaagaggggctggtcttactggagcagaagctttcccgagccaagacccagatcaacagccaactgcggcccatgatgtcagagctggaagagagggcacgtcagcagaggggccacctccatttgctggagacaagcatagatgggattctggctgatgtgaagaacttggagaacattagggacaacctgcccccaggctgctacaatacccaggctcttgagcaacagtgaagctgccataaatatttctcaactgaggttcttgggatacagatctcagggctcgggagccatgtcatgtgagtgggtgggatggggacatttgaacatgtttaatgggtatgctcaggtcaactgacctgaccccattcctgatcccatgg

SEQ ID NO: 1570 - DNA, 287 bp, Homo sapiens
ccaggaacagttctaggtacttgagttctagcagtaaataaacatgatcatcacagaggatgcacaggaagcatttaataaattcaagaggaattcagcctcatgaattatgaaatactgggaaatcattcatcatgtaaaaactggatataaaaagaaacctttcctgtaagagattagcctcttcaaaaaataaaataaaaacctaccctcagcatggccctgagcgcatggacacaggcacgactgcttgaaagaggcggcggccccacggcagcctggactgg

SEQ ID NO: 1571 - DNA, 193 bp, Homo sapiens
atttatgagggatccatccttatgatccaaacacctcccactaaacccgacttccaacactggggatcagatttcaacatgagatttgaagcggacaaatatctaaactacagcaaagagtacagatcgggaggcatggcaagctctgctggtcactccagtggggtcaacatttcaagaatgttacaagcag

SEQ ID NO: 1572 - DNA, 253 bp, Homo sapiens
aaaatctcttcttcctcaggagtcagcttggctcccttcttgcggcccaggggcagcgcatagtgggactcgtaccactgtcggtacggtgtgctgtcgatgagcacgatgcaattcttcaccagggtcttggtacgaaccagctcgttattagatgcattgtagacaacatcgatgatccttgttttacgagtacaacctccccgcacacggactgtgtggatgcggcgggggccaatcttggtgttggcag

SEQ ID NO: 1573 - DNA, 166 bp, Homo sapiens
aaaaattcagatttctacactcagtttaacaggagagacattcacacttaggtacttcagccccaactttcacggactattggaaattagaaggtactttgttgctaagtgaaaaaaatgcacattttttcatatcagggaaaattatactggacttaacagtttt

SEQ ID NO: 1574 - DNA, 264 bp, Homo sapiens
  misc_feature 96: n = A,T,C or G
ctgggtctccaagtggcagcgagtcagtaactttaagccaggtgtatatgcggtgtcagttactggtcgcctgccccaaggaatcgtgcgggagcntgaaaagtcgaggagtggcctacaaatccagagacacagctataaagacctagcaagatacaaggctgccagcatctttgctctccacctcctgcctctgcttatttcttgttctggaactaaatgaacagaacttcaaatacttcctaccctccaattcagactcag

SEQ ID NO: 1575 - DNA, 410 bp, Homo sapiens
  misc_feature 153: n = A,T,C or G
ctgasagaccaggagaagttccagatgcasagactgtgatgctcttgactatggaattattgcggccagtakccaagttaragacaaaacaggcataggtcccgttattatttggcgtgattttggcgataaagagaacttgtgtgtgttgcntgcggwatcccattkatwckccaagaatactgcggkgatgggttagaggccgagtggcaggagaggttgaggttcgctcccgaaaggtaagacgagtctgggggggaaatgatgggggtgtccggcccatagaggacatccagggtgactgggtcactgcggyttgcactcactgagttctggattccacatacataggctcttgcgtcatttcttgtgacattgaatasagtgagggtcctgttgccattggacag

SEQ ID NO: 1576 - DNA, 242 bp, Homo sapiens
ccatcttgttgctgcttggttagatcatatagctaatgaattaggcaggggagctattttttgaagatgatgaactaaatgttgaagacaagtttgagatctgtaaaatgtgattttttacttccacttataatacttgtgattggggaggtttgtggaaattcaattatgatgaaaaycctatcttttttgtaatgttggcatacttggggaatttagtggcaaatacattccccagcagg

SEQ ID NO: 1577 - DNA, 240 bp, Homo sapiens
cctacccgccgcagtactgatcattctatttccccctctattgatccccacctccaaatatctcatcaacaaccgactaatcaccacccaacaatgactaatcaaactaacctcaaaacaaatgataaccatacacaacactaaaggacgaacctgatctcttatactagtatccttaatcatttttattgccacaactaacctcctcggactcctgcctcactcatttacaccacccac

SEQ ID NO: 1578 - DNA, 528 bp, Homo sapiens
ctgtctcttacttttaaccagtgaaattgacctgcccgtgaagaggcgggcataacacagcaagacgagaagaccctatggagctttaatttattaatgcaaacagtacctaacaaacccacaggtcctaaactaccaaacctgcattaaaaatttcggttggggcgacctcggagcagaacccaacctccgagcagtacatgctaagacttcaccagtcaaagcgaactactatactcaattgatccaataacttgaccaacggaacaagttaccctagggataacagcgcaatcctattctagagtccatatcaacaatagggtttacgacctcgatgttggatcaggacatcccgatggtgcagccgctattaaaggttcgtttgttcaacgattaaagtcctacgtgatctgagttcagaccggagtaatccaggtcggtttctatctacttcaaattcctccctgtacgaaaggacaagagaaataaggccatttaagtttagtagtaaagactggttaatga

SEQ ID NO: 1579 - DNA, 522 bp, Homo sapiens
ccacagcatccccacgttctgagaagtacttggaaatggttgtctggaaagcttccactttggtcttgacggcattcaccctctccagcaccttctcctggattgctaccccaaaatcatttccatcttcaatcttggggatcaggtgttggatccatgtaatcaccagaatgcatttctctttgagagtccagacttctggcttaaccagggcaagcagggacaggactttctcattcccagggagaaatccacacttagggacttctttcttctcctgcttatctgtttccatctcatcatccttgggtggagggtctgggakgggggatgtccagtggggcccggagggaagtcaagtcagccacattgagggagtcctcttgcaagagctgattcaggtatatgattttctgtggcaaggatctgtagaggaattcctcaatcctcctggaaaagattctgtctgaagacctccacctgtttgcgggcttccccgctcaggcgcaccccacacggctt

SEQ ID NO: 1580 - DNA, 308 bp, Homo sapiens
cctagagatcgttcagggtgttgtaactgggaacatctgaatgctgaggcttagtccagtgttctctctcccttaccactcctcttccccttccctctataatggcagtacccagggcccggtccatagactactatcgagtgctcctatgtgcatcttagtacgtatcattttcccttgcctttttccttctatcctttcagtggtagcaactgcccttgctaatcaccgtaacctcggctgagaaagaagaggaagcgaaatccaagatgcagctcagttcatcaaagcctagcaggtcccctcag

SEQ ID NO: 1581 - DNA, 300 bp, Homo sapiens
ctgtgacctggagaaacatgccaagggacaagtgttatttgacaaagtgtgtgaacacctcaatctcttggagaaagactactttggacttttgtttcaggaaagccctgagcagaaaaactggttagatcctgctaaagaaataaagagacaaacctgcccgggcggccgcccgggcaggtctgcggaaacagcactcctcaacgatgccacggctgcgacggctcacacggcttgcgggcctgctgaagtagaagccgcggtccccacagacsaactggagggtgtccaccarctccc

SEQ ID NO: 1582 - DNA, 295 bp, Homo sapiens
ctgttaatccattctggggaggagagaacttagccatctgctcacattctgactaaagttaatttggcacttcaaataaaaaaaaaaaaaaacacacaaaactgactttctagccacaaaataaactagtagcaaatggtatctaccaaagaatgtcccagtcataatcattgggagaaactgtgacccgcacagtagctacattaagaccaaaaactttccatactatatttctatatagcaaatattcaagctgtattaaaactaattattgcagctttccattactatatgg

SEQ ID NO: 1583 - DNA, 427 bp, Homo sapiens
ctgcatcgcggcccacgacaagagggggaggtacgggaccctgttcacgatggaccgggtgctgacccccccaatggagactgtcatggatgtcctgaagggagacaatcgctttagcatgctggtagctgccatccagtctgcaggactgacggagaccctcaaccgggaaggagtctacacagtctttgctcccacaaatgaagccttccgagccctgccaccaagagaacggagcagactcttgggagatgccaaggaacttgccaacatcctgaaataccacattggtgatgaaatcctggttagcggaggcatcggggccctggtgcggctaagtctctccaaggtgacaagctggaagtcagcttgaaaaacaatgtggtgagtgtcaacaaggagcctgttgccgagcctgacatcatgg

SEQ ID NO: 1584 - DNA, 145 bp, Homo sapiens
ctggcactctgtcagtttcttgtagggtgaacaccgtggcaagccatgactgtagaaggagggcatctccatgatggctcgaaactcacctggtgctgcgcggatactattcaagtcatctgggatgtcatctgtggcccactgg

SEQ ID NO: 1585 - DNA, 128 bp, Homo sapiens
aaatacaaataaaatgagtgtagcaaaaataatgaaagctaacagcaggtaactttacaaataatggaatgtgaaccgtttctgcccttatccagagtaaaatgggtcacaactttgtctaaaggaac

SEQ ID NO: 1586 - DNA, 223 bp, Homo sapiens
aaaagacctttagtccgttctacttttcttgaagacggaggaccgtaagggatataaaggtttcactgaatactaagagcctgaaaaactaattggctgatttgactaataaaggctggtctgctatcagactgtatagaggtgggaaggctaaactgaggaattatgtctgacagaagggaagaaatgactgtggtggccttctcagaccctgtaggaaagg

SEQ ID NO: 1587 - DNA, 243 bp, Homo sapiens
ccatcagcagaccaggccagggaggtgcactggggtggttctgccttgctgctggtactgataacttcttgcttcagttcatctacaatgatctttccctctaaatcccagatcttgatgctggggcctgtggcagcacacagccagtagcggttagggctgaagcacagggcgttgatgatgtccccaccatctagcgtgtaaaggtgtttgccttcgttgagatcccataacatggcctgg

SEQ ID NO: 1588 - DNA, 266 bp, Homo sapiens; identical to SEQ ID NO: 1548

SEQ ID NO: 1589 - DNA, 122 bp, Homo sapiens
ccactgcaggggatggcctgatcgagctgcgcaagctggaagctgcagaggacatcgcgtaccagctctcacgctctcggaacatcacctacctgccagcggggcagtccgtgctcctccag

SEQ ID NO: 1590 - DNA, 200 bp, Homo sapiens
ccattgagtcggcaggcttcaagctcaacaagaagctgtacgagctcatcatcacccgctactcggagcccgacctggcggtcgactttgacaatttcgtttgctgcctggtgcggctagagaccatgttccgatttttcaaaactctggacacagatctggatggagttgtgacctttgacttgtttaagtggttgcag

SEQ ID NO: 1591 - DNA, 248 bp, Homo sapiens
ctgtgccactcggccatctctgtatgtgactgtgatgttggacatctggcagttcatgttgtcctctgcttcaatgagcttcccccgatatacctcaccggtgttcgtctcacatgtcacaatgtggccctcggcctcatgcagtactttaatcggcacaccaatagacatcttggcaggaagagagttcggctctggcctacttttcttctcttcggtccgctgcgaaagatgctacggcgaaggcg

SEQ ID NO: 1592 - DNA, 298 bp, Homo sapiens
cctgttgctgcaatcattgtacagggggaaatgggtatgagagactgaggcttgagtgaactgaaggcaaacagagccaagtatccttcagtccactggaaagacaagttcctgcatcaccacagcgtatatgcaattctatgcataggaagagcctttagagaaagcatttgagcgaaagtcatgtttggtgacatgattcatacagacctcttgagctcctggaaatagtagaattaagacctgaggagatgactcgtcatctcttatgcttcactttttggataaagaacttttt

SEQ ID NO: 1593 - DNA, 144 bp, Homo sapiens
aaatatttactgaatgcctactmcagaatcaaccatgttttakaacgatttttagtaacgctatcgcacttcttccatcaaagtaatgtttcccaaaacactartaaatgatctttaccaaatgcgcaggatagttgttcagta

SEQ ID NO: 1594 - DNA, 67 bp, Homo sapiens
cccgggggctctcctaggatcccytttccgtaaaagcgtgtaacaagggtgtvaatatttatmvttt

SEQ ID NO: 1595 - DNA, 263 bp, Homo sapiens
cccatctttatgcaaagccagcgttacagtaatgttccaggtaggtgtacatggtttatgctcttacagaggagaccttgtagataaccactccatgatgaacacaaaatgacaagcatatggctgaactttcaagtgatgtcatcttactactgagaagtgagagagaggtcttaaggggtctttgaatgactatttttaggtacataaaatgctttcctctgttgtctacagcatctcataatctatcctggggaattcag

SEQ ID NO: 1596 - DNA, 184 bp, Homo sapiens
ctgtttgcggggggctttcccaccggtggacttacgagcagtctgcttggttcgggccattttctttcacccaacgccgaagttttaggccacttctccgaccgccgcgccgcttccgctgcccgaggaagagccgcagtcgacgagcgaaaaaccagcaccgcccaacgaacgaccaaaccgc

SEQ ID NO: 1597 - DNA, 554 bp, Homo sapiens
ctgtaattctgccttttctaccttcattccatccttcctctgcccagataaagtccagcagaaattcctcctttctacctctctgggactctgagacaggaaatcttcaaggaggagtttttccctccccactattcttattctcaacccccagaggaaccaaggctgctgtacccacctcagggacagaactccacactatagtgggaaagcttcagggacccctccttttagtgctcagggctcacctatgctactggtccttttggcaaaaaaggaaaatgatagagccagggttgcccctgatgtagcagccttactgtggaggggccaaagctggtgttcagagctcacccaaggagggaggtgataaggtgtcatgcgttctgctgaacccactggctggtatgaacatgaggcttggggtgagggaaaccaagtaggggttggagaaggagcagcacctttgtaacacctggctacccatagctagctttctgccctcaaaaactcagccttcaagggatccagcccacacacgccacaggcagcag

SEQ ID NO: 1598 - DNA, 137 bp, Homo sapiens
ccttactttgtgattatacgttatctccggctagaaaaaaataatggtagmtaaagaaactgacaaactgaaaataagaaaacaaaaatcaaatgcctataataccataatgccagtttggtatagagtccaacttt

SEQ ID NO: 1599 - DNA, 222 bp, Homo sapiens
ctgaacgcaaatcagccactttaattaagctaagcccttactagaccaatgggacttaaacccacaaacacttagttaacagctaagcaccctaatcaactggcttcaatctacttctcccgccgccgggaaaaaaggcgggagaagccccggcaggtttgaagctgcttcttcgaatttgcaattcaatatgaaaatcacctcggagctggtaaaaagagg

SEQ ID NO: 1600 - DNA, 593 bp, Homo sapiens
ccattgccaaagactgagggcctggaatgaaatacacccctgttcagatgagcaagccctcctctctgccctacccagatgacaacctctccttgtatcatgcacctgagttgctctggttcccaccatctcataattactctaattctggagccattttgcggggaggcccagagtctgtgtggtgggaatggaaggtacccaactgcgacctgccacctggtcttcccaggagcatcactggcttgtgatgcccaggccagggccactctgctgctggacaacttggcagagcaggtctctgctgcccaccagaactggccctgagctcttggatatgtgtgtggcagcagccagggccaatccaagaggtggagtttggggtcctgagagttctagctttggattaccaggcagtatcgatgaggtgagtctaagaaggtgcccttagcgttggttcagcaccaagatgggggacagggatggaggctgtcaatatggcacaggtattagaagccctgtcctctgtcccttcacctactctagtctctgtaggctgagccaaagacggcagagaacaggttctaggtgaa

SEQ ID NO: 1601 - DNA, 480 bp, Homo sapiens
ctgcctgccctgaaagccccaggcgtcccattcaggaagaggcaaccagaacagaccgacggccccaccacagtcgtgcgcgggctcctctgcgatggctggcagcacagctcactcagcacacctgtatcatcatcgacgtcaccatgttatcaaaggccctggactggatgcggtcccccgggttgtagaaggggttgcacatcacgtctgtgtaggagttgtgtagcttccggaacatgctgcgaatttcgttgtctcgaagggctgtgttggaggaatctaccaccatgacaaacttcaccttggagttggtgacgtagccgtataccttgtagtcctccgtggggtagagcaggcccaggtacagctccctctggtcgaccagggccttccccattgcggagatcttctcatccaccacgtccagagatgtgtgcaccatgtagtggaacttcagctcgttctccgtaggggtgc

SEQ ID NO: 1602 - DNA, 195 bp, Homo sapiens
aaaagaaaaatgcttaaatttcagaatgagcaagattcacttttgtaggtagaggccctgcttcttcatgatcttcagttttagatctaacaaccacaagagaagaagctggatatctgtttagcttttgttcattcataaactccaagtcaccatagatactcagcttctcagagggaacatactgctccacag

SEQ ID NO: 1603 - DNA, 349 bp, Homo sapiens
ctgaaggaaaagattgatcgccgttctggtaaaaagctggaagatggccctaaattcttgaagtctggtgatgctgccattgttgatatggttcctggcaagcccatgtgtgttgagagcttctcagactatccacctttgggtcgctttgctgttcgtgatatgagacagacagttgcggtgggtgtcatcaaagcagtggacaagaaggctgctggagctggcaaggtcaccaagtctgcccagaaagctcagaaggctaaatgaatattatccctaatacctgccaccccactcttaatcagtggtggaagaacggtctcagaactgtttgtttcaattggacctg

SEQ ID NO: 1604 - DNA, 344 bp, Homo sapiens
cwcgattcakacccgcmacatccgmcatctgscatatattcttgkcatcaattgtgaggtgaacagctcaaaagakgctgatttctggagaatgcasgctgakgttgccttcaagatggcagtaaagaaacacggstggggaaatctycaagaacaaggaatttgctttggctgattggaaggaactagggagtctasagggtgtgctggtgtgtccctycattgaggagttgaagaacgtytggsttcctttctccattcgyatgaagatgaccaaaaacaaagggctggatgtttgcaattggactgatggggatgagatgcaggttgttgaaaaaccggga

SEQ ID NO: 1605 - DNA, 303 bp, Homo sapiens
cctaatcgccacacaccagcaaaggcaggttatgctatagtacaagccactagcccacctctcagaacctctcatttcctttccatcgtggaaatctatcctcaaggaaataacttctcagtgttccatctgctattctactactcctcagggattattcaggccccctcccttccctacacatcaggctggaggatttgccccacccaggactggcaaattacctttactcaacatgccctgattcaggaaactaaaatacctcctagtctaaatagacactttcactgaataaagtaaagg

SEQ ID NO: 1606 - DNA, 387 bp, Homo sapiens
ccaagagaggcatcctcaaacatctggagcctgaaccagaggaagagatcattgccgaggactatgacgatgatcctgtggactacgaggccaccaggttggagggcctaccaccaagctggtacaaggtgttcgacccttcctgcgggctcccttactactggaatgcagacacagaccttgtatcctggctctccccacatgaccccaactccgtggttaccaaatcggccaagaagctcagaagcagtaatgcagcagtaagccgaaaggatgaagagttagaccccatggaccctagctcatactcagacgccccccggggcacgtggtcaacaggactccccaagcggaatgaggccaagactggcgctgacaccacagcag

SEQ ID NO: 1607 - DNA, 341 bp, Homo sapiens
ccagacagactcctaaccaaccagatggactgccagacaggcagacatcagccacatggaatcctgacatcccagccagccggccagactctcatcttgatgtcttgatggatggaccccagctagtcagacatgatcctccagattgacagacaagtcccccaaatgagtacacatctccagctattcagacagatggacccccagcaaatcaggacctatctaggcagaccccagccagacccccgccagacagactcccaaccagactgaccccttactattcacacagcctgccgagtagctgggactacaggtctaatttttttttttttaagaaa

SEQ ID NO: 1608 - DNA, 574 bp, Homo sapiens
  misc_feature 552: n = A,T,C or G
ccatggaaccagacagaaaagcggctgttagtcactggcagcaacagtcttacctggactctggaatccattctggtgccactaccacagctccttctctgagtggtaaaggcaatcctgaggaagaggatgtggatacctcccaagtcctgtatgagtgggaacagggattttctcagtccttcactcaagaacaagtagctgatattgatggacagtatgcaatgactcgagctcagagggtacgagctgctatgttccctgagacattagatgagggcatgcagatcccatctacacagtttgatgctgctcatcccactaatgtccagcgtttggctgaaccatcacagatgctgaaacatgcagttgtaaacttgattaactatcaagatgatgcagaacttgccacacgtgcaatccctgaactgacaaaactgctaaatgacgaggaccaggtggtggttaataaggctgcagttatggtccatcagctttctaaaaaggaagcttccagacacgcyatcatgcgttctcctcagatggtgtctnctattgtacgtaccatgcagaa

SEQ ID NO: 1609 - DNA, 160 bp, Homo sapiens
aaaaaaccccaaaaaaatttacaaaaaatccgcgtctcccccgccggagacttttattttttttcttcctcttttataaaataacccggtgaagcagccgagaccgacccgcccgcccgcggccccgcagcagctccaagaaggaaccaagagaccgagg

SEQ ID NO: 1610 - DNA, 292 bp, Homo sapiens
caagctggtctcgaactcctgggctcaagtgacccacctacctcagcctctcacagtgctaggattacaggcgtaagccatcacacctggacttgaaatcctattgcactctaaatgtgtcgatctcttcatggtttttacaattaaatatttcttggcactcaagtttttccatatctgtgttatatattacaaattaatatcactgctgagctgcctatcagacaacaagcttctttgtggcatctatctcctaggaagataggaaggtggcgtgaggcaccgtgcctgg

SEQ ID NO: 1611 - DNA, 273 bp, Homo sapiens
cccggagcccacggtggtcatggctgccagagcgctctgcatgctggggctggtcctggccttgctgtcctccagctctgctgaggagtacgtgggcctgtctgcaaaccagtgtgccgtgccagccaaggacagggtggactgcggctacccccatgtcacccccaaggagtgcaacaaccggggctgctgctttgactccaggatccctggagtgccttggtgtttcaagcccctgcaggaagcagaatgcaccttctgaggcacctccag

SEQ ID NO: 1612 - DNA, 487 bp, Homo sapiens
ggacatgatcaaactgcagctcaaactccagggcagcgtgagtgttcaggtcaatgctggcccactagcatatgcgcgagctttcttagatgatacaaacacaaagcgatatcctgacaataaagtgaagctgcttaaggaagttttcaggcaatttgtggaagcttgcggtcaagccttagcggtaaacgaacgtctgattaaagaagaccagctcgagtatcaggaagaaatgaaagccaactacagggaaatggcgaaggagctttctgaaatcatgcatgagcagatctgccccctggaggagaagacgagcgtcttaccgaattcccttcacatcttcaacgccatcagtgggactccaacaagcacaatggttcacgggatgaccagctcgtcttcggtcgtgtgattacatctcatggcccgtgtgtggggacttgctttgtcatttgcaaactcaggatgctttccaaagccaatcact

SEQ ID NO: 1613 - DNA, 283 bp, Homo sapiens
ccaaggctcccatagaggcgctgtgtcagtgaagatgtacgactacctgttgggaaggacaaagggatgaggctccagagagagttggctgccacagcctctgccaagctttgtctttggggcttgctgcagaaacctggcctacggaagatacgacaccactgggagggttgtgtaggtgccaggggaccatcgtggttctctagggcgctgtggaaattgggtcttgggctgggtggcatctggcagtcatggataacacttgcttttccagttaatgtgg

SEQ ID NO: 1614 - DNA, 178 bp, Homo sapiens
aaaatagggactagaaattatttgaagttttctttattacggattcaaagacttattttgaaagttggaaggagaagggagggaagagagcagaagggaagaaggtgtaagtcaagctcttgaatataactggtggtattgtgggcagagatctttagttcaaatccacgtatttttt

SEQ ID NO: 1615 - DNA, 135 bp, Homo sapiens
cctgagtctctcccttgctccccgctccccgccaggctctgctctgaatgactctcctgtgggtctggctgcctatattctagagaagttttccacctggaccaatacggaattccgatacctggaggatggagg

SEQ ID NO: 1616 - DNA, 286 bp, Homo sapiens
ccagagaacaagatgctcccttgctgagctcctgggagcgtggaaggagatgctaggccctggcacagtgttatgtggactgggccacgatagggtggagtgagctagtgaagaaggcagagggagacttggcttctggtctcagctatgcctgttttgtgaccttgattgagttgcttgggctttacttctgcctacaaatcaggggtaaaaatacctgttgggaggagaaatgagaacatagaggaaagcctcttggaggaaaggtgctcggaccaagtctcag

SEQ ID NO: 1617 - DNA, 180 bp, Homo sapiens
cctttgagaagctaagcttggttaaaaggagttttaggatggaattgaaaactgagtctagttctgcttgaagggggcagctttttactcagctttgtgcactttggggtgctcgctcggggtgtccgcatttctcagaccttggtttggttccctgcacagtaagtactaatggttagg

SEQ ID NO: 1618 - DNA, 313 bp, Homo sapiens
aaaatctttttacttactaatatggaaggctattcacaatatattggtatattcacatatatattatgtgaaaaaaggaagcattacatgaaaaatgtgtgcggaatatgctattatttatgtaaggtggggaatatttcttagttcaggttagatctctggtgaaaactccctggatctaatttactaaaagaactttcttctacctgatgtgtaaattcactgtctaacatccccaacaagtaatgatccagatttttctggaattacagtaaagcagcattcagcagcccacagacattctcttaaattt

SEQ ID NO: 1619 - DNA, 209 bp, Homo sapiens
aaaaaatacaccacacgatacaactcaatacaggagtatttcttctcaaattcttctagcaccatcaacattcttcaagtatctgaaatactattaattagcacctttgtattatgaacaaaacaaaacaaggacctcagttcatctctgtctaggtcagcacctaacaatgtggaccacactcatgggaaagtgttttgaggtagttt

SEQ ID NO: 1620 - DNA, 200 bp, Homo sapiens
aaaccttaaaaggggtcatgctagaataaacctaatataaagattccttgcctcgtagaaggagcaccaatgggagtcagaaaagaactctggagttctcccactagtaatgtgtttaatcatggaagttattagcctgttttctcacctgagaaataatatggttggacctacatgacttctcaggtagtttatgtttt

SEQ ID NO: 1621 - DNA, 207 bp, Homo sapiens
cctgcgggctgacccagaatccgatcatgcacctgtcctcatgccagcggctttggctggggttggtctgaagcctgcacgcggcagttctttgttaaagatctgagggactcctcagtcctggggcgtcgccgcctgcagcctcttccaagccctgcgtccagcgagcgtcacagcacaacctgcaaaaacggagctgggctgcag

SEQ ID NO: 1622 - DNA, 218 bp, Homo sapiens
ctgcagtaggactgcaatttcacagcaaatcacaggttccagaacagggaggctgtgtgggttgtagcacagcacatgtgccacacggcacagagaggatctgtgttctgctaccctgccatcttggagctagcgacaggagccgggcaaagacggaaaggggacttcggccagtgagcagcagaggaggactaaagagaagagggagaagaggctgg

SEQ ID NO: 1623 - DNA, 225 bp, Homo sapiens
aaatgtggaaataaggcaaagcatacttgttagtcacaattactttcagatataattgagactacactgctatacataattaggtacacagtatgtataacaatgcatactatggtgtggagttaattccaattaccatattttatatttattggtcacaacagcatacattttatgctccaaaatacatggatctgacaaaatggttacatttaatgttctttt

SEQ ID NO: 1624 - DNA, 174 bp, Homo sapiens
ctgtttcagaactttgtgcaggactgcattggctggcttgtttcctgccattgactccttggacaggtgctgatgactttccgccaaacactccacctcagcaaagcgggtgttgagggccatggaagggtgagaagggtcttctgacatgttcaagtaagcagcccggcgcag

SEQ ID NO: 1625 - DNA, 266 bp, Homo sapiens
ccatggctaggtttatagatagttgggtggttggtgtaaatgagtgaggcaggagtccgaggaggttagttgtggcaataaaaatgattaaggatactagtataagagatcaggttcgtcctttagtgttgtgtatggttatcatttgttttgaggttagtttgattagtcattgttgggtggtgattagtcggctgttgatgagatatttggaggtggggatcaatagagggggaaatagaatgatcagtactgcggcgggtagg

SEQ ID NO: 1626 - DNA, 389 bp, Homo sapiens
ccactgttataacaaaccctggggtggaattcggcctttcgcataggggctttaactggactctagttcctgggagcagaggggcgaatgaggcgggggatttctcagccagtttctgactgcccctagtgtatgtggcattttggttcagtatgaattactgagactcatctgcttgccactcagggggaaagttgggcaggcaccgtcgagtgtctgccactcaaaaggaataagctgctttctgtggtgctgtgctaaggaaactgaaaaatactgcaatatccttccctactaaatttcaagtgacactgctgtgagaaaggtgacctctaaaattaacttaatcatttggggtataagaagtctttaagtagacttgtaaattt

SEQ ID NO: 1627 - DNA, 271 bp, Homo sapiens
catgcactttgaccgccttgtgcgaaaacaccacctggggcgcgtcctgcgccgggctagggctctctttgctgattacctgcagtcagaggtgtgggactcagaggagggggctgaggccacagccgcatcttgatcaggctttctcaagccctccatcggccccaccagatctccattctttgccatgagggccaacacatgagaccccacctccctccctgcctgccagccctagacttgttggagcatagagcccttcctccccagg

SEQ ID NO: 1628 - DNA, 294 bp, Homo sapiens
ctgggcggatagcaccgggcatahtttggaatggatgaggtctggcaccctgagcagtccagcgaggacttggtcttagttgagcaatttggctaggaggatagtatgcagcacggttctgagtctgtgggatagctgccatgaagtaacctgaaggaggtgctggctggtaggggttgattacagggttgggaacagctcgtacacttgccattctctgcatatactggttagtgaggtgagcctggcgctcttctttgcgctgagctaaagctacatacaatggctttgtgg

SEQ ID NO: 1629 - DNA, 432 bp, Homo sapiens
ccaattgatttgatggtgagggagggatcgttgacctcgtctgttatgtaaaggatgcgtagggatgggagggcgatgaggactaggatgatggcgggcaagatagttcagacggtttctatttcctgagcgtctgagatgttagtattagttagttttgttgtgagtgttaggaaaagggcatacgggactaggaagcagataaggaaaatgattatgagggcgtgatcatgaaaggtgataagctcttctatgataggggaagtagcgtcttgtagaccctgaagcggaaatgtgagacaggctggcacctccggaaaaactgcctttcagccttggtgttccgtgcaaggtgaaaagaaataggtcctcccagtttacagcttgaaatcaggctagtgagtggccctggagaccacgaggggagaattt

SEQ ID NO: 1630 - DNA, 171 bp, Homo sapiens
aaaaaattttttggcagagacagggtctcatcatgttgccctggctggtcttgacctactgggctccagcgatcctcctgccttggcctcccaaagtgctgggattacaggcgtgagccaccgcacccggccacacttttccaaattgtaagcaggtaggagggccctagg

SEQ ID NO: 1631 - DNA, 171 bp, Homo sapiens
ctgccactcctgcctctgttatcccaacccaaaccggagagggtgctcagcaagaacacaggtcccagaagccaagaaggtgttggcatccctgtcattgaattcaggggtccaagaactgtttgcataaaatatcattagacctaagagatggtcaaaggcacaaagttt

SEQ ID NO: 1632 - DNA, 441 bp, Homo sapiens
ctggcctttgtagatcctgctcccaaacttttaattataacctaggttagggcctcacattataagaggtgggatatgtatctccatctcttcccagctctgcggacacacattctagcacaaacagaggaataattccagttcagttcaaagacagaaggtggacagggtccaagggtttaaggcaatgcaatccattacttttcaaaatctgaggacttttttgttttcctttgatatgctaaaaatatcccagcccagggaaactgataaaatgtctttacagagttatttatacgttggaattgaataaatttacaaaactaagtaaaatatattttggtttctataaaagggcatttttcctccttgcacttaaaatgagttgattctgtggttatttcccagttggctcacaaattcttacttttggattcacag

SEQ ID NO: 1633 - DNA, 264 bp, Homo sapiens
caaagctcgagtcagggagatggaggaagaagctgagaagctaaaggagctacagaacgaggtagggaagcagatgaatatgagtccacctccaggcaatgctggcccggtgatcatgtccattgaggagaagatggaggctgatgcccgttccatctatgttggcaatgtggactatggtgcaacagcagaagagctggaagctcactttcatggctgtggttcagtcaaccgtgttaccatactgtgtgacaaatttagtgg

SEQ ID NO: 1634 - DNA, 214 bp, Homo sapiens
cctaggtattgatgttaccttaattctttagtctggaagaacttggttgggggtgggggatggtaagcatttccttaaccaaacccacacttcacatctcctaggggtaccccttcatccaccaacctccagagaataacctggctgccctcacttctccagcttttctcacaaggcacttgttacagggctgctgatgggagagggaggaagg

SEQ ID NO: 1635 - DNA, 286 bp, Homo sapiens
aaaaacaaaacaaaaaaaccacttaatatttcagactgttacaggaaacaccctttagtctgtcagttgaattcagagcactgaaaggtgttaaattggggtatgtggtttgattgataaaaagttacctctcagtattttgtgtcactgagaagctttacaatggatgcttttgaaacaagtatcagcaaaaggatttgttttcactctgggaggagagggtggagaaagcacttgctttcatcctctggcatcggaaactcccctatgcacttgaagatggttt

SEQ ID NO: 1636 - DNA, 475 bp, Homo sapiens
  misc_feature 155: n = A,T,C or G
aaatygtyatakcaatgatgatamkaatgcctggtytgccatagatctgggtctctgggtrataccatcagcatatacacttygkcatgctcgkggttatggaaggkctgcactgasaaatwgggttttccaggtatccctagatggacagarcntggacttctttgtatacccatgtkgatgactgcagkctcaatgaaccagggtcaactgcaacttggcctcttgatccaccaaaggatgagaaacaagggtggagacatgtgagaattaaacagatggggaaaaatgccagtggacaaacacactacctctcattatctggattcgaactttatggcactgtaaatggagtatgtgaagatcagctagggaaagcagctaaagaagcagaagctaatcttagacggcagagacgtctagtacgttcccaggttctgaaatacatggttccaggagctcgtgttatcagagg

SEQ ID NO: 1637 - DNA, 327 bp, Homo sapiens
ccaccgggatagccgggggtctggcaggaatgggaggcatccagaacgagaaggagaccatgcaaagcctgaacgaccgcctggcctcttacctggacagagtgaggagcctggagaccgagaaccggaggctggagagcaaaatccgggagcacttggagaagaagggaccccaggtcagagactggagccattacttcaagatcatcgaggacctgagggctcagatcttcgcaaatactgtggacaatgcccgcatcgttctgcagattgacaatgcccgtcttgctgctgatgactttagagtcaagtatgagacagagctgg

SEQ ID NO: 1638 - DNA, 476 bp, Homo sapiens
ggcagatcagggccagagctggaaggaggaggtggtgaccgtggagacgtggcaggagggctcactcaaagcctcctgcctatacgggcagctccccaagttccaggacggagacctcaccctgtaccagtccaataccatcctgcgtcacctgggccgcacccttgggctctatgggaaggaccagcaggaggcagccctggtggacatggtgaatgacggcgtggaggacctccgctgcaaatacgtctccctcatctacaccaactatgaggcgggcaaggatgactatgtgaaggcactgcccgggcaactgaagccttttgagaccctgctgtcccagaaccagggaggcaagaccttcattgtgggagaccagatctccttcgctgactacaacctgctggacttgctgctgatccatgaggtcctagcccctggctgcctggatgcgttccccctgctctcagcatatg

SEQ ID NO: 1639 - DNA, 209 bp, Homo sapiens
aaaaaatacaccacacgatacaactcaatacaggagtatttcttctcaaattcttctagcaccatcaacattcttcaagtatctgaaatactattaattagcacctttgtattatggacaaaacaaaacaaggacctcagttcatctctgtctaggtcagcacctaacaatgtggatcacactcatgggaaagtgttttgaggtagttt

SEQ ID NO: 1640 - DNA, 418 bp, Homo sapiens
ccacggacatccaggcactgaaggcagccttcgacgtcaataacaaggacgtgtcggtgatgatgagcgagatggacgtgaacgccatcgcaggcacgctgaagctgtatttccgtgagctgcccgagcccctcttcactgacgagttctaccccaacttcgcagagggcatcgctctttcagacccggttgcaaaggagagctgcatgctcaacctgctgctgtccctgccggaggccaacctgctcaccttccttttccttctggaccacctgaaaagggtggcagagaaggaggcagtcaataagatgtccctgcacaacctcgccacggtctttggccccacgctgctccggccctccgagaaggagagcaagctccctgccaaccccagccagcctatcaccatgactgacag

SEQ ID NO: 1641 - DNA, 308 bp, Homo sapiens
cctcagtggtgagcaggggaagcctaggccgaaatgaaagggggtggcatccatgagcctagacagaagtcagcagatgaacaggcatctcagtagctttgtccaccaaacctggtgctcttcagctctcaggcccctgtggcggtttagatccagaatgcccattttctgttccatctaaccagcttttagcagtttaatgccctgcccacccaaaggcatttcgtcctcttctgccctctgcacgggtgggctctctgcatcacttcccaccgctggagaaggggtgctctgcgtgctcacagttt

SEQ ID NO: 1642 - DNA, 372 bp, Homo sapiens
ctggagcctgagtccgctgcacggagactctggtgtgggtcttgacgaggtggtcagtgaactcctgatagggagacttggtgaatacagtctccttccagaggtcgggggtcaggtagctgtaggtcttagaaatggcatcaaaggtggccttggcgaagttgcccagggtggcagtgcagccccgggctgaggtgtagcagtcatcgataccagccatcatgagcagcttcttaggcacaggtgcggagacgatgccagtgcccctgggtgcagggatgaggcgtaccagcacagagccgcagcggcctgtcaccttgcaagggacagtgtggggcttgccgatcttgttcccccagtagcctctgcgca

SEQ ID NO: 1643 - DNA, 500 bp, Homo sapiens
aaatacattgaacataactgttcacataagagacgtatgtgtgttccttgcaccaacttttagcggccttacatctatatctactttcctgcttacaagagaactttggaaccaaggagcaggacttttagctgcttgttttattgctattgtaccaggctacatatctcggtcagtagctggatcctttgataatgaaggcattgctatttttgcacttcagttcacatactatttatgggtaaaatctgtaaaaactgggtcagttttttggacaatgtgctgctgcttatcctatttctatatggtctctgcttggggtggttatgtatttatcatcaatcttattccactgcatgtatttgtgttgttactgatgcagagatacagcaaaagagtctacatagcatatagcactttctacattgtgggtttaatattatcaatgcagataccttttgtgggattccagccaatcagaacaagtgaacacatggcag

SEQ ID NO: 1644 - DNA, 237 bp, Homo sapiens
ccttcccatcagcacagttcgtgaggtggctttactgaggcgactggaggcttttgagcatcccaatgttgtccggctggtggacgtctgtgccacatcccgaactgaccgggagatcaaggtaaccctggtgttcgagcatgtagaccaggacctaaggacatatctggacaaggcacccccaccaggcttgccagccgaaacgatcaaggatctgatgcgccagtttctaagagg

SEQ ID NO: 1645 - DNA, 340 bp, Homo sapiens
ctgagagaccaggagaagttccagatgcagagactgtgatgctcttgactatggaattattgcggccagtagccaagttagagacaaaacaggcataggtcccgttattatttggcgtgattttggcgataaagagaacttgtgtgtgttgctgcggtatcccattgatacgccaagaatactgcggggatgggttagaggccgagtggcaggagaggttgaggttcgctcccgaaaggtaagacgagtctgggggggaaatgatgggggtgtccggcccatagaggacatccagggtgactgggtcactgcggtttgcactcactgagttctggattcc

SEQ ID NO: 1646 - DNA, 234 bp, Homo sapiens
cctgaaggaagagctggcctacctgaagaagaaccatgaggaggaaatcagtacgctgaggggccaagtgggaggccaggtcagtgtggaggtggattccgctccgggcaccgatctcgccaagatcctgagtgacatgcgaggccaatatgaggtcatggccgagcagaaccggaaggatgctgaagcctggttcaccagccggactgaagaattgaaccgggaggtcgctgg

SEQ ID NO: 1647 - DNA, 209 bp, Homo sapiens
aaaatactgactattcataatgaaggaaaatagcaaccaactcttttagacacaataaacatggttagaagttctggcctatgacttgaaacaaataaccctgagcatacatttttgaaaaacattgtcagattcattgctgtaagtatgaagagttaataatctggaagggaattatggaattaagctgaacccatgcctgcatattt

SEQ ID NO: 1648 - DNA, 200 bp, Homo sapiens
aaaaagccaagcctctaactgttccaggttaaatgagactgaggagatgtgacaactaattgcaatatgtgatctgggataaaagacactggaccagaaaaatatatatattagtgagataactggcaaaatttaggacttgtaaaatagataataatattgtatcagtgttaatttccaggtctgatcattgtactgtg

SEQ ID NO: 1649 - DNA, 340 bp, Homo sapiens
ccaagatggtgaaaccccgtctctactaaaaatacaaaaattaaccaggcatggtggcaggtgcctgtggtcccagctactcgggaggctgaggcaggagaatcgcttgaacccgggaggcagaggttgcagtgatccgagatcatgccactggactccagcctgacagagtgagactccatctcaaacacacacacacacacacacacacaccacacacacacacacaggttcctcaccataagctttggggaaaattcttggcttttttgctgggggagagagcagtgcccagggaagattggctgatctcagagctggagggtttatgcgggactgg

SEQ ID NO: 1650 - DNA, 122 bp, Homo sapiens
cctcagatattaaccccactgcatgttaatgacacaccactgaggtgcagctcaatgtaattattaaagcttataacacacttccccaagaatttatagattctttctataaataataattt

SEQ ID NO: 1651 - DNA, 244 bp, Homo sapiens
cctcctgggattcattcctgttgcctggaatcttcatgggatcctacgggacttctactcaccactggtgcctgacagcatgaaatttgagattggagaggctctttacttgggcattatttcttccctgttctccctgatagctggaatcatcctctgcttttcctgctcatcccagagaaatcgctccaactactacgatgcctaccaagcccaacctcttgccacaaggagctctccaagg

SEQ ID NO: 1652 - DNA, 223 bp, Homo sapiens
aaaaagtggaggagaaatgctttcacattttacctacataaacctaatgtttgttcagttgcctgttttgcaagaatcttggactaaggtaaatgaaggcagaagataaagtgatccctgttcctttattccaagttaaagtttttaattaagccccatttgttatatgaaatgttaatcctaccaaatgtagttagataggcttgaattggacataggattt

SEQ ID NO: 1653 - DNA, 123 bp, Homo sapiens
ccagtcagggatgaggatggggcccgagggtctaaagaaggcactagagggacagggacsgctttgggtctcacaadwmaakttcacagtctgccctcttagtgtgaggaaatggggcttgag

SEQ ID NO: 1654 - DNA, 573 bp, Homo sapiens
cctgacctcaagcaaccatgaactcagctattaagaaaatcacatttccagggcagcagccgggatcgatggtggcgctttctcctgtgcccacccgtcttcaatctctgttctgctcccagatgccttctagattcactgtcttttgattcttgattttcaagctttcaaatcctccctacttccaagaaaaataattaaaaaaaaaacttcattctaaaccaaaacagagtggattgggctgcaggctctatggggttcgttatgccaaagtgtctacatgtgccaccaacataaaacaaaaccaagccttggctcgttctcttctctcttcaatctctggaaaaataagtacatatagttgataacccctcttagcttacaggaagctttttgtattaattgcctttgaggttattttccgccagacctcaacctgggtcaaagtggtacaggaaggcttgcagtatgatggcaggagaatcagcctggggcctggggatgtaaccaagctgtacccttgagacctggaaccagagccacaggccccttttgtgggtttctctgtgctct

SEQ ID NO: 1655 - DNA, 133 bp, Homo sapiens
aaagaataaagtccaaagtcagatctggtctagttaacctagaagtatttttgtctcttagaaatacttgtgatttttataatacaaaagggtcttgactctaaatgcagttttaagaattgtttttgaattt

SEQ ID NO: 1656 - DNA, 233 bp, Homo sapiens
aaatgccgattcacattactctgttcaagctgcgttgagatgttaaactggcttactatagacttcgtaaaaatggctccagaagagtaacaaactgaaatctttgagatcacacaggttggaaatatgtacataactgcacaaggtgtcaattctgctctacagtgcagttttagtcagttttagttgcataggtttccattgtatttatagtctgtttatgctaaatctgg

SEQ ID NO: 1657 - DNA, 305 bp, Homo sapiens
aaattccagagagtaggctaggtgatgtaagtgactgactgaaaaaacaagtatcaataactcttaaagttttcagttagaaatttctgtaagttagcctcaagaaactccactactaaactggaaaaccatgactaggaacaggaagcggccctggggtagaagcattctaaagaattgtgacccaactgcatcaatatctgatttcatcttttattaaaagctgagagttaaagaactgtagggataactaagtccacctcaaagtccagacagaaactgccctcccaaagaaacaatgtttc

SEQ ID NO: 1658 - DNA, 278 bp, Homo sapiens
aaagttatgagaacatacacatggtttacaacttttactatatacctttccttggccttagttctaccatagagtatcttctctaattaaaatgactgggaaatatatggaagcagaaaccagcacaaagcactacccatctagaaataatctttcagttaaaaaacaactctcaaaaccagcactcatttctctaagataggttataagtattttacgatttcttgttatattaaattgagttaaaggtactgacaagtcaatatgcaaatgggttt

SEQ ID NO: 1659 - DNA, 428 bp, Homo sapiens
ctgctgctgaaatttgggggcaaataaccggagtaggtttgttcctgtgccttggcgagtcgccggcctgctgggaacgggacttctaaaaggaactatgtctggaaggctgtggtccaaggccatttttgctggctataagcggggtctccggaaccaaagggagcacacagctcttcttaaaattgaaggtgtttacgcccgagatgaaacagaattctatttgggcaagagatgcgcttatgtatataaagcaaagaacaacacagtcactcctggcggcaaaccaaacaaaaccagagtcatctggggaaaagtaactcgggcccatggaaacagtggcatggttcgtgccaaattccgaagcaatcttcctgctaaggccattggacacagaatccgagtgatgctgtacccctcaaggattt

SEQ ID NO: 1660 - DNA, 178 bp, Homo sapiens
aaattctagaatgacaaactaatttattcattagttttcttttgacaacagaactctaaacacacaaaattaatgcagtgagtggcctcagcaccctcccagttaacacttctttaagctagattacaagaacaataaaaccattcagaagacatacactccctatgcacttcatagg

SEQ ID NO: 1661 - DNA, 175 bp, Homo sapiens
ccaagctcaaaggacactatgcctgcacctcctactaccacatcagcctttgttgagctatctacaacctcccacggcagcccgagctcaattccaacaacccacttttctgccagctctacaaccttcggccatagtgaggaattgacaacagtccacagcagcccagttgcac

SEQ ID NO: 1662 - DNA, 254 bp, Homo sapiens
aaaaatgctatcctcaacttcaccaactgctaacatgatcatctgtactctttgcagattgacataaccactttctgtaaggtaacccccagttttgtgtaccacatttttgtatatgttaaccaaacggtcaattgcattttccctaatctctaacgatggcaaatgagggaggaagtcatttcccacaaagaagcacatgaaaacccagtcatcaatgctcctctcaacatcaaatgtgaatggtaggctgg

SEQ ID NO: 1663 - DNA, 147 bp, Homo sapiens
ccataaaagacaagcaggaaggaattgagtaggggccagagggggctctgctcggcctgtgagccccgttcctacctgtgcctgaccctccgctccaggtaccacaccgaggagagcggccggtcccagccatggcccgccttgtgg

SEQ ID NO: 1664 - DNA, 515 bp, Homo sapiens
cctagctttcaacaaataatagaaagaagggtcttgtatttatatgctgagaagtaagaatgcagggagtgatgatgaaggaaagggtttgtgggaaatggagaggaaagaaaggtagtaggatgtttccctttcaagtgtggcacgagtttcaaaactacagattagggactgaccaaaacaaaaatatctgaagactaaaacaaaccactgcctcctatcttttttgaggatgaatggtcccaagtaatccttgtgagttttcgttaggttgggaaggaagtaagttcaagtctatagatctataaccgtggaaactgcagtgctcctggatggagtggcaaaggcttctccaaggactgtggtggtgggagaaggggacagaataatgactgctatttttccaatgatgcccttcagaatacaggcaatgccaacttatccattaggcacagtacctaaggcccacagttttttagaagcccacaaaaatgttttaattttttttagcctca

SEQ ID NO: 1665 - DNA, 601 bp, Homo sapiens
  misc_feature 533: n = A,T,C or G
aaaaaggacaaaatagtcatttaggaattaattgaatctgaatagttgaattgaagtaagagttggtaggggtagcaatatcgtagaaaagaagttggggaattgaggaggctcttcagtgatatagccagaggagaaataactgcaatactaagagatgtacatacatcttcaggtttctttttcatgtgataatgattgttttccattttaattacattatacaactttttagtgagatttaacctaatttgtttatcttacaggattcatctaattgatgagtttaataccgatatggatatctttgtgtttctgctatcaacaaaagctggtggattaggaataaatctgacttcagcaaatgttgttatacttcacgatattgactgtaatccttataatgacaaacaagcagaagatagatgccatagagtaggccagactaaagaagtactagttataaaactaataagccaagggacgattgaagaatccatgctaaaaattaaccaacagaaattgaaactagnacaggatatgactacagtagatgaaggtgatgaagggagtatgccagcagatatagccacattactaa

SEQ ID NO: 1666 - DNA, 263 bp, Homo sapiens
cctatccccttgccgatgcccacctcaccaagaagctactggacctcgttcagcagtcatgtaactataagcagcttcggaaaggagccaatgaggccaccaaaaccctcaacaggggcatctctgagttcatcgtgatggctgcagacgccgagccactggagatcattctgcacctgccgctgctgtgtgaagacaagaatgtgccctacgtgtttgtgcgctccaagcaggccctggggagagcctgtggggtctccagg

SEQ ID NO: 1667 - DNA, 202 bp, Homo sapiens
cctagtacaatcttgggaacagggttactgtatactgaaggtctgacagtagctcttagactcgcctatcttaggtagtcatgctgtgcattttttttttcattggtgtactgtgcttgatttgtctcatatatttggagtttttctgaaaaatggagcagtaatgcagcatcaacctattaaaatacattttaagcccttt

SEQ ID NO: 1668 - DNA, 218 bp, Homo sapiens
tggtctcataactaggttgagtttttctcctctgctgaggaaacagtaccgaagttctttttcttgtggcatttgtattataaaaacttggtgtgggggaggagcacaaaactccagcccactgaacctctgccaattaagatggtgttgggttaggttacatctggttactgtcctgggaaaatcatttttatagagatggccttccaagtggtttt

SEQ ID NO: 1669 - DNA, 242 bp, Homo sapiens
ccaagggtcatgatggcaggagtaatcagaggtgttcttgtgttgtgataagggtggagaggttaaaggagccacttattagtaatgttgatagtagaatgatggctagggtgacttcatatgagattgtttgggctactgctcgcagtgcgccgatcagggcgtagtttgagtttgatgcccaccctgatcagaggattgagtaaacggctaggctagaggtggctagaataaataggagg

SEQ ID NO: 1670 - DNA, 103 bp, Homo sapiens
aaatttatttatgtagatcacatcatttttatcgtatgcagtgcaaatatgtgaaatgtcttttggtttattccaacaattatttattttagaaagtaagttt

SEQ ID NO: 1671 - DNA, 251 bp, Homo sapiens
caagaattcaaacccagcactcaatgacaatctggagaagggactcctgaaagccctgaaggttttagacaattacttaacatcccccctcccagaagaagtggatgaaaccagtgctgaagatgaaggtgtctctcagaggaagtttttggatggcaacgagctcaccctggctgactgcaacctgttgccaaagttacacatagtacaggtggtgtgtaagaagtaccggggattcaccatccccgagg

SEQ ID NO: 1672 - DNA, 304 bp, Homo sapiens
aaattatactgtagctgatgaaactcctgattttgtagttaatttattaagtctgggatgtagaacttcaagaagtaagagctaagttctaagttcatgtttgtaaattaatacttcatttggtgctggtctattttgattttggggggtaatcagcattattcttcagaaggggacctgttttcttcaagggaagaaacactcttattcccaaactacagaataatgtgttaaacatgctaaatagttctatcaggaaaacaaatcactgtatttatctccgcaggctatttgttcagagagg

SEQ ID NO: 1673 - DNA, 346 bp, Homo sapiens
gtggtaagtacattttctttaacgtttttcctgcttttcttcccaaatgtgtctttttctttgggctactgtaccctgcctccagtgctgtccccggcataggtccatctctgcagaagccatttcaggagtacctggaggctcaacggcagaagcttcaccacaaaagcgaaatgggcacaccacagggagaaaactggttgtcctggatgtttgaaaagttggtcgttgtcatggtgtgttacttcatcctatctatcattaactccatggcacaaagttatgccaaacgaatccagcagcggttgaactcagaggagaaaactaaataagtagagaaagtttt

SEQ ID NO: 1674 - DNA, 457 bp, Homo sapiens
ctggctaaagtgcaggatgggaggatggctgagcattatctgcaggctccaatcacacttccgtggcactgggaactgcagttttcaactcctacccttacaaatgtttcaccaaatcctttatgttcacctctttgccctctgagggggaaaaggagacattcagatcacaaggaaagaatctcagaagggaaagaggggaagtagaggggtctgcgtaatccacaaatgaaattatcagtccctgacatgatccagagttgactgaaacctaatcaagaccgcaagaggtcagtgtagcaaacacaaagggaaaggaaatggaaacaaatcaaaacaaaacttttaagaggaaatggaccgcaggtgctcagtgactatgtatgctttgggtagaaagaaaagataacttcttaggtttctgcctcttcacttgggggaaaaaaggggggcctgg

SEQ ID NO: 1675 - DNA, 143 bp, Homo sapiens
ccttcatcctcctccccarctcttctcttcctagatctgcaggctacacctctggctaragccgakgggagagagggactcaagggaaaggcawgctygakgccaagatggctgctgcctgctcatggccctcggaggtmcag

SEQ ID NO: 1676 - DNA, 326 bp, Homo sapiens
gcaagaccatggtggggaagatgtggcctgtgttgtggacactctgtgcagtcagggtgaccgtcgatgccatctctgtggaaactccgcaggacgttcttcgggcttcgcagggaaagagtgtcaccctgccctgcacctaccacacttccacctccagtcgagagggacttattcaatgggataagctcctcctcactcatacggaaagggtggtcatctggccgttttcaaacaaaaactacatccatggtgagctttataagaatcgcgtcagcatatccaacaatgctgagcagtccgatgcctccatcaccattgatcag

SEQ ID NO: 1677 - DNA, 237 bp, Homo sapiens
ccaaaggtgaccaggaggggccggagctgggcccaattcccactcccttgaggtaacgatcggctaatcctgacatgctggccctggtgggtccgagtctgatggaggtgagtcacctcaatggctagcccatagtttggctgcttctcccgggtccagcgaaggaccgcagggctcacatcaaaagtttcccaccgtgtcacattgtggtggaccagtctcgtgtccagtagtcgt

SEQ ID NO: 1678 - DNA, 126 bp, Homo sapiens
ccttgaccgcgtacttccgcagcgggtacagccgctccttccgctgctgcttcttggtcttcaggttctcctcgtgcttgttgagccggcggcgcatggcacgtgtcttcttaggccgcaggtcca

SEQ ID NO: 1679 - DNA, 250 bp, Homo sapiens
ccttcattgacctcaactacatggtttacatgttccaatatgattccacccatggcaaattccatggcaccgtcaaggctgagaacgggaagcttgtcatcaatggaaatcccatcaccatcttccaggagcgagatccctccaaaatcaagtggggcgatgctggcgctgagtacgtcgtggagtccactggcgtcttcaccaccatggagaaggctggggctcatttgcaggggggagccaaaagggt

SEQ ID NO: 1680 - DNA, 570 bp, Homo sapiens
ccaagtttattattaattcataccccaaatattttcagaaggacatagctgaacctcatataccgtgtttaatgcctgagtactttgaacctcagatcaaagacataagtgaagccgccctgaaggaacgaattgagctcagaaaagtcaaagcctctgtggacatgtttgatcagcttttgcaagcaggaaccactgtgtctcttgaaacaacaaatagtctcttggatttattgtgttactatggtgaccaggagccctcaactgattaccattttcaacaaactggacagtcagaagcattggaagaggaaaatgatgagacatctaggaggaaagctggtcatcagtttggagttacatggcgagcaaaaaacaacgctgagagaatcttttctctaatgccagagaaaaatgaacattcctattgcacaatgatccgaggaatggtgaagcaccgagcttatgagcaggcattaaacttgtacactgagttactaaacaacagactccatgctgatgtatacacatttaatgcattgattgaagcaacagtatgtgcgataaatg

SEQ ID NO: 1681 - DNA, 249 bp, Homo sapiens
cctctttttaccagctccgaggtgattttcatattgaattgcaaattcgaagaagcagcttcaaacctgccggggcttctcccgccttttttcccggcggcgggagaagtagattgaagccagttgattagggtgcttagctgttaactaagtgtttgtgggtttaagtcccattggtctagtaagggcttagcttaattaaagtggctgatttgcgttcagttgatgcagagtggggttttgcagtcc

SEQ ID NO: 1682 - DNA, 533 bp, Homo sapiens
cctctgttcacaagagcacgacgtggtccccgcctgctgctagtctgtctgccactgggggcctcccaacatccatagcacacttcagcggaaggaccccagaaactgttgtgtttgtgtgtgctgatgacctagtgtgtcatttcacctcgtcacccagccctgcgtccggatgaggggacttctgcacaaatgacagaatctcggctggtggacagatactacagctttctcctcctccttgtgttcgtgttcagtctctgtggagactttcttttccattcaaatgacagtgcgcacttatctggtttacacaatgataccattttgaaagttggaagcctcaaactgagacgacagtgcagaacaaaacaaaagtgagttagggtcgttaaaattgaagtgttcttcttagggcaaacatgttgactccgagtattgtgtatgaatgtgctacgagaaacttccaaagagcaccattcacaatttggcattttcaaagaatgttccagccctcaaaggggcaactcttt

SEQ ID NO: 1683 - DNA, 155 bp, Homo sapiens
ccaaactcaccaacgagctcaaagaggagcaggaaatgaacaagtgtttgcgagccaaccaagtcctcctgcagaacaagctaaaagaggaggagagggtgctgaaggagacctgtgaccaaaaagatctgcagatcaccgagatccaggagcag

SEQ ID NO: 1684 - DNA, 185 bp, Homo sapiens
cctagagtgatgtcagtagcagaaatagaagagataagatcacttcagctttgaacaacatgagtttaagatatccatgggacatttaggtggagatgatctgtaataatagcagctactatttattgaaaacttgttatatgatagatattgtcctaagttcttgatgtaattacttaatcctt

SEQ ID NO: 1685 - DNA, 229 bp, Homo sapiens
cggctcccagaggtattcccagacaagcaactatgaactagctgtggccctctcccgctgggtgttcaaggaggagggtgtcctccgtgtggggcctgtgtcccatcatcgggtgggcgagacagccccacccaatgcctacactgtcactgacctagtggagtatagcatcgtgatccagcagctctcaaatggcaaatgggtcccctttgatggcgatgacattcag

SEQ ID NO: 1686 - DNA, 495 bp, Homo sapiens
ctgcagtgtccctttttatatcatgctagtgttgagacatacttgactaacttgggaacagttcgatatattgacaaccgtcaacttaagaaaatcaacagcttttggccccagcgtccaagtgaacttttcatggagtgcagaatctcaaatggacaaaatactttgtctttttacctgcccgggcggccgcccgggcaggtaaactttttatttgcatattaaaaaaattgtgcattccaataattaaaatcatttgaacaaaaaaaaatggcactctgattaaactgcattacagcctgcaggacaccttgggccagcttggttttactctagatttcactgtcgtcccaccccacttcttccaccccacttcttccttcaccaacatgcaagttctttccttccctgccagccagatagacagatgggaaaggcaggcgcggccttcgttgtcagtagttctttgatgtgaaaggggcagcacagtcattt

SEQ ID NO: 1687 - DNA, 499 bp, Homo sapiens
  misc_feature 428: n = A,T,C or G
gtgcgagatagtagtagggtcgtggtgctggagtttaagttgagtagtaggaatgcggtagtagttaggataatataaatagttaaattaagaatggttatgttagggttgtacggtagaactgctattattcatcctatgtgggtaattgaggagtatgctaagattttgcgtagctgggtttggtttaatccacctcaactgcctgctatgatggataagattgagagagtgaggagaaggcttacgtttagtgagggagagatttggtatatgattgagatgggggctagtttttgtcatgtgagaagaagcaggccggatgtcagaggggtgccttgggtaacctctgggactcagaagtgaaagggggctattcctagttttattgctatagccattatgattattaatgatgagtattgatnggtagtattggttatggttcattgtccggagagtatattgttgaagaggatagctattagaaggattatgg

SEQ ID NO: 1688 - DNA, 198 bp, Homo sapiens
ctgccaccttcacagttatggggctgaagcgtgcacaccaacactgagacgccttcccatgaaaaattccgaagatgctcaagagggaggtttcctcctgagtgaagagaagtgattctcccttgactctggctcctgccaccacaaatgttaccctcattggcttgaaaagcatccaagggtgcacagggagtatgg

SEQ ID NO: 1689 - DNA, 254 bp, Homo sapiens
  misc_feature 208: n = A,T,C or G
ggcaggactatgctgaatctccttaggcactctctaatcagatgtcctargtcctcccaattcttagacatttaatacccatttttctmctmcttttattmggaccttgtatcttccatttagcttctcaaatcatycaaaaccgtatccaggccatcaccaatcattctatacgacaaatgtttcttctaacmtccccatgatatcnccccttaccacaagacctcccttcagcttaatctctmccactctag

SEQ ID NO: 1690 - DNA, 241 bp, Homo sapiens
ccttgaaattaaccaccaaatgtccagagtgtgaaaacagcctgaagttgatccgctgtatgcagttttatccttttctgtacaacatcacttcttctgtttgcagtggtaattgtcatgagaaaaccctggacaacagccatgacaaacagaaatattttgacaactcacagtcactggatgctgctgaagaagagccctctgagagaggaacagaggaggaccctgtattctctgttga

SEQ ID NO: 1691 - DNA, 456 bp, Homo sapiens
ctgcagcctgggactgaccgggaggctctgattatttacccaccacaggtaggttgtgttctgaatctcaggttcacaggttaaggctacagcatcctcatcctccacggggttggagttgttgctggtgatgaagggtttgggtggctctgcatagactgtgatcgtcgtgactgtggtcctattgaggccagtgtctgagttatgggcttggcacgtataggatccactattattcacagtgatgttggggataaagagctcttgggtggattgctggaaagtcccattgacaaaccaagagtactgtgcaggtgggttagaggctgcgtggcaggagaggttcagattttcccctgatctgtaagatgtgtttagaggggaaatggtgggggcatccgggccatagaggacattcaggatgactgaatcactgcgcctggcactcactgggtt

SEQ ID NO: 1692 - DNA, 301 bp, Homo sapiens
aaagggtgctaaagacagggttttccttctcttggcccctcccattcccagaggctcaagagccctttagggcagggcataggagccagcgggagctgccacggttgagaagagaagcaggttttgtacactgggatggagtgtgcgtgacataaaacacctcaaacctgcccgggcggccgcccgggcaggtctggcctggatgcttcaaaaagtatcatgggaaaatatgtcggggttgttgtagactgaaagtgactagagttgaaaccaaaagaatgtatgaaccttgatgggacct

SEQ ID NO: 1693 - DNA, 128 bp, Homo sapiens
cctgcgggctgacccakaatccgatcatgcacctgtcctcatgccagcggytytggctggggttggtctgaagcctgcacgcgrcagttctttgttaaagatctgagggactyctcagtcctggggcg

SEQ ID NO: 1694 - DNA, 114 bp, Homo sapiens
catcaacaaccgactaatcaccccccaacaatgactaatcggttgttgatgagatatttggaggtggggatcaatagagggggaaatagaatgatcagtactgcggcgggtagg

SEQ ID NO: 1695 - DNA, 267 bp, Homo sapiens
ccagaggacatcaattacaatatggatttttcattcattcaacgaatatttgagcacctacaagtgccagacattggaggtacagggtaaacaggaggatccttgctctcacggagcttacattctagcaggaggacaatattaatgtttataggaaaatgatgagtttatgacaaaggaagtagatagtgttttacaagagcatagagtagggaagctaatccagcacagggaggtcacagagacatccctaaggaagtggagttt

SEQ ID NO: 1696 - DNA, 196 bp, Homo sapiens
ctgctgcttcagcgaagggtttctggcataaccaatgataaggctgccaaagactgttccaataccagcaccagaaccagccactcctactgttgcagcacctgcaccaataaatttggcagcagtatcaatgtctctgctgattgcactggtctgaaactccctttggattagctgagacacaccacctgcccgg

SEQ ID NO: 1697 - DNA, 244 bp, Homo sapiens
ctgaggtgggagtggagaatggttcccaggaagacagttccacctctaaggtccgaaaatgttccctttaccctggagtgggagtgaggggtcatacaccaaaggtattttccctcaccagtctaggcatgactggcttctgaaaaattccagcacacctcctcgaacctcattgtcagcagagagggcccatctgttgtctgtaacatgcctttcacatgtccaccttcttgccatgttccag

SEQ ID NO: 1698 - DNA, 293 bp, Homo sapiens
aaagttggtgcatctagaaagctttgaatgcagaagcaaacaagcttgatttttctagcatcctcttaatgtgcagcaaaagcaggcgacaaaatctcctggctttacagacaaaaatatttcagcaaacgttgggcatcatggtttttgaaggctttagttctgctttctgcctctcctccacagccccaacctcccacccctgatacatgagccagtgattattcttgttcagggagaagatcatttagatttgttttgcattccttagaatggagggcaacattccacag

SEQ ID NO: 1699 - DNA, 352 bp, Homo sapiens
aaaaagtaaaatataacagagaaaactgcacaaaacagaagtgttcaaattaaattttttttttttttgagacagggtcttgccctgttgcccaggctggagtgcggtggtgctaccttggctcgctgcagtatcaacctcctgggctcttcccgtctcagcctcccaagtagctgggaccgcaggctcatgccaccatgcctggctaattttttaagtttttgtagagacagggtctcactatgttgccaaagctggtcttgaactcttggcctcaagtgatcctcctgccttggcctcccgaagtgggattacaggagtaagccactgtgttcagccagaggcaggattt

SEQ ID NO: 1700 - DNA, 281 bp, Homo sapiens
gtagcagtgagtgcctgtagtcccagctactcgggaggctgaggcaggagaatcgcttgaacccaggaggtggatgttgcagtgagccgagatcccgccactgcactgcagcctaggcgacagagcaagactccgtctcaaaaaaaaaaaaaaaaaaaccaagtcattcccacttgctgggcctccctttctttctgaagagagagcgtcagttcaracatcttgtagggctcactccctcacctcctccaagccctctccctgcagcccagcctggtcag

SEQ ID NO: 1701 - DNA, 166 bp, Homo sapiens
aaatggtacagaaaaaaatatwgtatacttaaaaatgattaaaacttcacattaggaaatgctaaaaacccagtaatttacacaatgataaaatctaaagtgacgggaaaacataaaatattttcatttggtcctgtcacctaacaaaacgatcataaatatgaga

SEQ ID NO: 1702 - DNA, 418 bp, Homo sapiens
ctgtcagtcatggtgataggctggctggggttggcagggagcttgctctccttctcggagggccggagcagcgtggggccaaagaccgtggcgaggttgtgcagggacatcttattgactgcctccttctctgccacccttttcaggtggtccagaaggaaaaggaaggtgagcaggttggcctccggcagggacagcagcaggttgagcatgcagctctcctttgcaaccgggtctgaaagagcgatgccctctgcgaagttggggtagaactcgtcagtgaagaggggctcgggcagctcacggaaatacagcttcagcgtgcctgcgatggcgttcacgtccatctcgctcatcatcaccgacacgtccttgttattgacgtcgaaggctgccttcagtgcctggatgtccgtgg

SEQ ID NO: 1703 - DNA, 180 bp, Homo sapiens
aaaaaaggaaggaatcgaaccccctaaagctggtttcaagccaaccccatggcctccatgacttttttgtctagattttatgtatacgggttcttcgaatgtgtggtagggtggggggcatccatatagtcactccaggtttatggagggttcttctactattaggacttttcgcttcga

SEQ ID NO: 1704 - DNA, 438 bp, Homo sapiens
cagtaacgtattatcctgtttatttagcttggttttagctgtgttctctctggataatccacttgatgttaggaacattacttctctgcttattccatattaatactgtgttaggtattttaagaagcaagttattaagtaagaaaagtcaaagtattaattcttaccttctattatcctatattagcttcaatacatccaaaccaaatggctgttaggtagatttatttttatataagcatgtttattttgatcagatgttttaacttggatttgaaaaaatacatttatgagatgttttataagatgtgtaaatatagaactgtatttattactatagtaaaggttcagtaacattaaggaccatgataatgataataaaccttgtacagtggcatattctttgatttatattgtgtttctctgcccattttcttt

SEQ ID NO: 1705 - DNA, 82 bp, Homo sapiens
aaaatgagtaaaacctctgtacttctgctggcattaagggttgatggtgttaccatgtatcatcatggcggtactatttttt

SEQ ID NO: 1706 - DNA, 594 bp, Homo sapiens
ccaggttttagatattaacctggctgcagagccaaaagtgaaccgaggaaaagcaggtgtgaaacgatctgcagcggagatgtacgggtcagtaacagaacacccttctccgtcccctctactcagctcctcttttgacttggactatgactttcaacgggactattatgataggatgtacagttacccagcacgtgtacctcctcctcctcctattgctcgggctgtagtgccctcgaaacgtcagcgtgtatcaggaaacacttcacgaaggggcaaaagtggcttcaattctaagagtggacagcggggatcttccaagtctggaaagttgaaaggagatgaccttcaggccattaagaaggagctgacccagataaaacaaaaagtggattctctcctggaaaacctggaaaaaattgaaaaggaacagagcaaacaagcagtagagatgaagaatgataagtcagaagaggagcagagcagcagctccgtgaagaaagatgagactaatgtgaagatggagtctgaggggggtgcagatgactctgctgaggagggggacctactggatgatgatgataatgaagatcg

SEQ ID NO: 1707 - DNA, 210 bp, Homo sapiens
ccactgccaagagaatgaagcacccagtctcgtaccattttgagccctccagcactacttattttcccccacctttgcctgctgttgctggaagagctggctcatacccccaaaggacactttcagcgacagctatggacagcatggtaccaaggagttaagttgaggctttttccagctttctctggttcatttgattgcttgataagg

SEQ ID NO: 1708 - DNA, 570 bp, Homo sapiens
ctgcaatcccaggcagcagtgcagctatcactcagatcatggacacagcaccgtgggcatggatatgccatgctggagcccttagatgccctctagccactctggagcatcttccgatggacagtgggggaatctgaaggggctcgcttggtgctatggtctttcagaggctctgtagtgctctgtgggtggaccctgggggggcctgatctcatttgagctgattttccattacgcctgaagagtttctagggggctgcctctcactggcagagtagaaacacccactggagccaccacacacatccacctggcttcttagacaccgtcaaggaatggtgtcttcctcagtaccccacagctcccacactgtcatcccccagccaagggccatccctagaaaaactggtttactgttcctaaggaaaccattgtctatagcccttagccttgtggtttaggcaagaggccaggtcaggtgccctagagtgaggcaggggcttcagccaaagttgtgatcgcagcttctgaggcagttcctcartggagtcagagtccgctgccacctga

SEQ ID NO: 1709 - DNA, 266 bp, Homo sapiens
aaatagttgaatcattaacaacctggtgggaggcaagtcatttaattgaaccactaggaagtgtattttcttttctttttctgccaactttttggtggcatttgtaaaagctgatataaaaggctctgagatgttattttcagttattccataggcaagcctttttacagagcatatgtctccagttggcagcttgagatatttccgagcatcccgttctagctaccagtgcctcccaatgcttagtgcacagtactgtagactgg

SEQ ID NO: 1710 - DNA, 200 bp, Homo sapiens
aaatggaattgaaaggaactagccttggctagttgcagaattcacacatatggggctatggcaacagcagattctggagtctcagggtcttttctttctagataagttacagggcaattgcttttcagagtacttttacatttctattccattcttgtcagtaaagacaaggatcccataagctgatggagaaactgagg

SEQ ID NO: 1711 - DNA, 239 bp, Homo sapiens
ccttatcccttcgtggagcccactaggtgccgacccctcagaatataaccctcatgcctggacccctgagagcttctgatcccagctattagggacagaagaagcctccaaatctggaaggtgctgaatgccctgctgactgggaaagtttcagggcactgatggggtctacctggtaagcggagggcctgaggaaacctgtagcttcaatcatgtctggtaaccgggtgcctgagccc

SEQ ID NO: 1712 - DNA, 244 bp, Homo sapiens
ctggaacatggcaagagggtggacatgtgaaaggcatgttacagacaacagatgggccctctctgctgacaatgaggttcgaggaggtgtgctggaatttttcagaagccagtcatgcctagactggtgagggaaaatacctttggtgtatgacccctcactcccactccagggtaaagggaacattttcggaccttagaggtggaactgtcttcctgggaaccattctccactcccacctcag

SEQ ID NO: 1713 - DNA, 306 bp, Homo sapiens
ttggattcattggactgggcaacatggggaatccaatggcaaaaaatctcatgaaacatggctatccacttattatttatgatgtgttccctgatgcctgcaaagagtttcaagatgcaggtgaacaggtagtatcttccccagcagatgttgctgaaaaagctgacagaattattacaatgctgcccaccagtatcaatgcaatagaagcttattccggagcaaatgggattctaaaaaaagtgaagaagggctcattattaatagattccagcactattgatcctgcagtttcaaaagaattgg

SEQ ID NO: 1714 - DNA, 342 bp, Homo sapiens
ccacagacaggagactgtggggaccttggacctagggggagcctccacccaaatcacgttcctgccccagtttgagaaaactctggaacaaactcctaggggctacctcacttcctttgagatgtttaacagcacttataagctctatacacatagttacctgggatttggattgaaagctgcaagactagcaaccctgggagccctggagacagaagggactgatgggcacactttccggagtgcctgtttaccgagatggttggaagcagagtggatctttgggggtgtgaaataccagtatggtggcaaccaagaagattatgaaaaggggggtatttt

SEQ ID NO: 1715 - DNA, 76 bp, Homo sapiens
ctgaagatgccccattgtacccccattcacctggatctcagtatcaacagaataaccatgtgcatggacagccata

SEQ ID NO: 1716 - DNA, 121 bp, Homo sapiens
ctggaatgaatggagttcatcccctccacctgaatgcctgctgtggtctgatcttaagggtctatatatttgcacctcctcattcaacacagggctggaggttctacaacaggaaatcagg

SEQ ID NO: 1717 - DNA, 430 bp, Homo sapiens
ccaatgtggcgaaacgctgtctctactaaaactacaaaaattagctgggcgtggtggcgcgtgcctgtaatcccagctactcggcaggctgaggcaggagaatcgcttgaactggggaggtggaggttgcagtgagccgagatcacaccactgcattccagcctgggtgacagagggagactccgtctctaaaaaacaaccccccccccccaaaaaaaaatgcatagcaagctgtaatgctctttgtgttttagaatagtagaggtctggaaagttgtttgcttttccccagtttttttttgctgtgttacctctgaagggaattgaggtagaggggagagttagaaggaatattcggcttttctattttatatcctcctaggtgaaatttttacaacaaacatgtactggtgtattttgaaatgttttt

SEQ ID NO: 1718 - DNA, 365 bp, Homo sapiens
gacagcgccaacgatggcttcgtgcggcttcgaggactcccatttggatgcacaaaggaagaaattgttcagttcttctcagggttggaaattgtgccaaacgggatcacattgcctgtggaccccgaaggcaagattacaggggaagcgttcgtgcagtttgcctcgcaggagttagctgagaaggctctagggaaacacaaggagaggatagggcacaggtacattgaggtgtttaagagcagccaggaggaagttaggtcatactcagatccccctctgaagttcatgtccgtgcagcggccagggccctatgaccggcccgggactgccaggaggtacattggcatcgtgaagcaggcagg

SEQ ID NO: 1719 - DNA, 303 bp, Homo sapiens
gcaggtccgagaaggagaacaccccgagcgaggccaaccttcaggaggaggaggtccggaccctatttgtcagtggccttcctctggatatcaaacctcgggagctctatctgcttttcagaccatttaagggctatgagggttctcttataaagctcacatctaaacagcctgtaggttttgtcagttttgacagtcgctcagaagcagaggctgcaaagaatgctttgaatggcatccgcttcgatcctgaaattccgcaaacactacgactagagtttgctaaggcaaacacgaagatgg

SEQ ID NO: 1720 - DNA, 244 bp, Homo sapiens
ctggaacatggcaagaaggtggacatgtgaaaggcatgttacagacaacagatgggccctctctgctgacaatgaggttcgaggaggtgtgctggaatttttcagaagccagtcatgcctagactggtgagggaaaatacctttggtgtatgacccctcactcccactccagggtaaagggaacattttcggaccttagaggtggaactgtcttcctgggaaccattctccactcccacctcag

SEQ ID NO: 1721 - DNA, 262 bp, Homo sapiens
atcatccaactattggatgattatccgaaatgtttcattgtgggagcagacaatgtgggctccaagcagatgcagcagatccgcatgtcccttcgcgggaaggctgtggtgctgatgggcaagaacaccatgatgcgcaaggccatccgagggcacctggaaaacaacccagctctggagaaactgctgcctcatatccgggggaatgtgggctttgtgttcaccaaggaggacctcactgagatcagggacatgttgctgg

SEQ ID NO: 1722 - DNA, 313 bp, Homo sapiens
ctgatgaaaatccagacaaaagcactttagaaaaagctattggatcactgaaggaagtaatgacgcatattaatgaggataagagaaaaacagaagctcaaaagcaaatttttgatgttgtttatgaagtagatggatgcccagctaatcttttatcttctcaccgaagcttagtacagcgggttgaaacaatttctctaggtgagcacccctgtgacagaggagaacaagtaactctcttcctcttcaatgattgcctagagatagcaagaaaacggcacaaggttattggcacttttaggagtcctcatgg

SEQ ID NO: 1723 - DNA, 360 bp, Homo sapiens
aaaatcactacagattgaaaactagtatattgaactctaaggacatatctctttcttacactggaattctaaagaagaatgtactgagcattacttattctttcattcttcttagattcttcttaatcctttggtgaaaactgagacacaaaatggctgcaaataagcccaagggtcagaattctttggctttacacaaagtcatcatggtgggcagtggtggcgtgggcaagtcagctctgactctacagttcatgtacgatgagtttgtggaggactatgagcctaccaaagcagacagctatcggaagaaggtagtgctagatggggaggaagtccagatcgatatcttagatacag

SEQ ID NO: 1724 - DNA, 504 bp, Homo sapiens
ctgagttagctggacaaggactagggaggcaatcagtattatttattcttgaacaccatcaagtctagacttggtggcttcatatttctatcataatccctgggggtaagaaatcatatagtcccaggttgggaaggggaaaacggtttgcaacattctcctccttgtaggaggcgagctctgtctcactagctatgcccctccatcaattcaccctatactcagatcagaagctgagtgtctgaattacagtatattttctaaattcctagcccctgctggtgaatttgccctcccccgctcctttgacaattgtccccgtgttcgtctccgggccctgagactggccctgcttatcttgctgaccttcatcctctgctggacaccttattacctactgggtatgtggtactggttctcccccaccatgctaactgaagtccctcccagcctgagccacatccttttcctcttgggcctcctcaatgctcctttggatcctct

SEQ ID NO: 1725 - DNA, 307 bp, Homo sapiens
aaaatactgagcggtattgaatacttcgaagcagaacaggcaatgtgcagccctcatttatgagaaaaccctcaggaaactcccagggtgatgcttggagaagctgtgagttgagctgaagctggagaacttcctccagagcaaagggcttaagaaagaaagaagaactctaagctgggtctgctaacatcactccagtttagatggatcttggcagagagacatgcttgttcctctggattggaaagatgatttactctcgggaatcttctctgtcagcctgtacatctaaaggcatgaagcactc

SEQ ID NO: 1726 - DNA, 379 bp, Homo sapiens
ctggtacaaaggcgaaagagtggatggcaacagtctaattgtaggatatgtaataggaactcaacaagctaccccagggcccgcatacagtggtcgagagacaatataccccaatgcatccctgctgatccagaacgtcacccagaatgacacgggattctataccctacaagtcataaagtcagatcttgtgaatgaagaagcaaccggacagttccatgtatacccggagctgcccaagccctccatctccagcaacaactccaaccccgtggaggacaaggatgctgtggccttcacctgtgaacctgaggttcagaacacaacctacctgtggtgggtaaatggtcagagcctcccggtcagtcccaggctgcag

SEQ ID NO: 1727 - DNA, 76 bp, Homo sapiens
aaaagagctgtaactagttgtaagtgcttaggaagaaactttgcaaacatttaatgaggatacactgttcattttt

SEQ ID NO: 1728 - DNA, 92 bp, Homo sapiens
aaaaaagtgacatttgctttattactattggcaggtggggcctgcatgaggtggttagtgtgctcaggggatgggtgggctgtggagatgat

SEQ ID NO: 1729 - DNA, 489 bp, Homo sapiens
ctgcatcctgtccagcaacatcatctcagttgctgagaacggcctacagtgccccacaccccaggtgtgtgtgtcctcctgcccggaggacccatggactgtgggaaaaaacgagttctcacagactgttggggaagtcttctatacaaaaaacaggaacttttgtctgccaggggtaccctggaatatgacggtgatcacaagcctgcaacaggaactctgccccagtttcctcctcccctctgctccagctctgggacgctgctttccatggaccaacattactccaccggcgctcccagggatcaccaatgacaccaccatacagcaggggatcagcggtcttattgacagcctcaatgcccgagacatcagtgttaagatctttgaagattttgcccagtcctggtattggattcttgttgccctgggggtggctctggtcttgagcctactgtttatcttgcttctgcgcctggtggctgggcc

SEQ ID NO: 1730 - DNA, 556 bp, Homo sapiens
ctgccaacaagcgtctcaaggatgctctccagaaacaacgggaggttgcagataagcggaaagagactcagagccgtggaatggaaggcactgcagctcgagtgaagaattggcttggaaacgaaattgaggttatggtcagtactgaggaagccaaacgccatctgaatgacctccttgaagatagaaagatcctggctcaagatgtggctcaactcaaagaaaaaaaggaatctggggagaatccacctcctaaactccggaggcgtacattctcccttactgaagtgcgtggtcaagtttcggagtcagaagattctattacaaagcagattgaaagcctagagactgaaatggaattcaggagtgctcagattgctgacctacagcagaagctgctgggtgcagaaagtgaagacagaccaaaacaacgctgggagaatattgccaccattctggaagccaagtgtgccctgaaatatttgattggagagctggtctcctccaaaatacaggtcagcaaacttgaaagcagcctgaaacagagcaagaccag

SEQ ID NO: 1731 - DNA, 263 bp, Homo sapiens
ctgcatcagcttatagttactatcattatggccggaagactgttcaggtgataaaagactgatgaaagtcatccctcactgttagtaaggaagcagtatacatcaatgggaacagggcccatggaaatgtacaggagtttccctattttggtgttcagcttgaaaaaggacttgtcagaatcaactgtgtcatcaaaattmaagtaatgtgcattgaaaataaggttgatcatgggaatatgcagaatttccaatgtattttt

SEQ ID NO: 1732 - DNA, 401 bp, Homo sapiens
aaagaacataagaattcccattgcccagcctcagtgcatttggcaaatgcttactttgcttcccagagtcagagaattggcaaaggttcctaaatggtaatctggccggcctgggagaaagactcacgagaaaagccagtggagaaagcgcccttccagggcggcagcagcgggagccacgcagaccccgaggcgcacctgctggctcttgtgtgtggccccagtttctagcggcttttgcagcattagcctacaagctttgtcactccctgccctctgtggtggtcactgtttttctctcttgccaaatgaggcagtctctgagtgacggtgactgtggccttgaagcctggaggactgttgggcatgtagactggcaccttgaagattcaccattgttt

SEQ ID NO: 1733 - DNA, 244 bp, Homo sapiens
  misc_feature 31: n = A,T,C or G
cctcactggtcacccaggtwgaatgaaaggnwgtasgtgatgagaaagaaagccatgaccagyatcatsccacttgccacttcattcttaatagggtasgtggaatcctgtwgcttcttgctcttcttgtctggacgacttatgtscagattcttcatgtatgtggacagsacctgggagactccaatgccagakagaatgcacataacaggtgccaacactagcattagacgcaccattacag

SEQ ID NO: 1734 - DNA, 166 bp, Homo sapiens
cgcaaaactaaccccctaataaaattaattaaccactcattcatcgacctccccaccccatccaacatctccgcatgatgaaacttcggctcactccttggcgcctgcctgatcctccaaatcaccacaggactattcctagccatgcactactcaccagacgcct

SEQ ID NO: 1735 - DNA, 169 bp, Homo sapiens
aaaatgaccgctactcttttactatgttgctctgtcaaaatatagttcagaagtgttgtcttcccagcacttaaatacccggtgataattgtgactgggatcttggcgccgaggccagacttttcctcctcctcgctttgcgtcgtctcaatgggaaccaattcaggac

SEQ ID NO: 1736 - DNA, 456 bp, Homo sapiens
cctggagatagttgctaagttgctaggaacatgtggtgggactttcatattctgaaaaatgttctatattctcatttttctaaaagaaagaaaaaaggaaacccgatttatttctcctgaatctttttaagtttgtgtcgttccttaagcagaactaagctcagtatgtgaccttacccgctaggtggttaatttatccatgctggcagaggcactcaggtacttggtaagcaaatttctagaactccaagttgctgcagcttggcattcttcttattctagaggtctctctggaaaagatggagaaaatgaacaggacatggggctcctggaaagaaagggcccgggaagttcaaggaagaataaagttgaaattttaatttgcattttttttgtctagataagaatagcgtgaatagatcctcttttattcgtaaataatcgtgcatctgtggg

SEQ ID NO: 1737 - DNA, 415 bp, Homo sapiens
cctacagacttatttcttcttggacacacccacggtgcggccacggcggccagtggtcttggtgtgctggcctcggacacgaaggccccagaagtgacgcagccctctatgggcccgaatcttcttcagtcgctccaggtcttcacggagcttgttgtccagaccattggctaggacctggctgtattttccatcctttacatccttctgtctgttcaagaaccagtctgggatcttgtactggcgtggattctgcataatggtgatcacacgttccacctcatcctcagtgagttctcccgccctcttggtgaggtcaatgtctgctttcctcaacaccacatgagcatatcttcggcccacacccttaatggcagtgatggcaaaggctattttccgccgcccatcgatgttg

SEQ ID NO: 1738 - DNA, 192 bp, Homo sapiens
cctgtcattacaggtagtagttggtggtacatccagtctgtatttcttacacaaaattacatctaaatatttgacatgaggccatttgctatcataagccatcactaggaacttctagtctgtctcactcgattgaggctacaatgttgttaggtgctatgaccacaatgaatacaacagacagcctctcag

SEQ ID NO: 1739 - DNA, 444 bp, Homo sapiens
  misc_feature 74: n = A,T,C or G
ctgcaatcccaggcagcagtgcagctatcactcakatcatggacacagcaccgtgggcakggatatgccatgcntggagcccttagatgccctmtagccactctggagcatcttccgatggacagtgggggaatctgaaggggctcgcttggtgctatggtctttcagaggctstgtagtgctctgygggtggaccctgggggggscctgatctcatttgagctgattttccattacgcctgaagagtttctagggggctgyctctcactggcwgagtagaacacccactggagccaccacacacrtccacctggcttcttagacaccgycaaggaatggtgtcttcctcagtaccccacakctcccacactgtcatcccccakccaagggccatccctagaaaaactggtttactgttcctaaggaaaccattgtctatascc

SEQ ID NO: 1740 - DNA, 174 bp, Homo sapiens
gccggggtggtaggggctggcttgctgaccgtcgtccagcagctcctgggcaaaggggctgccctggtcaaagggccctgggtctagggcctcctggaaggccatgccatccttctccagcagctcaatgatccaactgagctcatcagaagagctggaagtgaggtctcgcag

SEQ ID NO: 1741 - DNA, 163 bp, Homo sapiens
attgctgcctatatcaagaaggaatttgacaagaaatataaccccacctggcattgtatcgtgggccgaaattttggcagctacgtcacacacgagacaaagcacttcatctatttttacttgggtcaagttgcaatcctcctcttcaagtcaggctaggtgg

SEQ ID NO: 1742 - DNA, 229 bp, Homo sapiens
cctatggcatccgcttcgacatcattgtgtttgggaaggcagggaaatttgacatcatccccactatgatcaacatcggctctggcctggcactgctaggcatggcgaccgtgctgtgtgacatcatagtcctctactgcatgaagaaaagactctactatcgggagaagaaatataaatatgtggaagattacgagcagggtcttgctagtgagctggaccagtgagg

SEQ ID NO: 1743 - DNA, 170 bp, Homo sapiens
aaaaaaaaaagagagagagagaaagaaagaaacactgctgggccagtgtctgaggtcccctcctcacttccagacctggcaatatccctttaggcagtgcagagatggtggggggttggaggagtggggaaagggaagtttgttacctggctcccactgccctctggtgg

SEQ ID NO: 1744 - DNA, 286 bp, Homo sapiens
ctggcttaataaccacagacggtcaacaacaaaatgttatggtttacacaacatcatatcaacagatttctggtgttcagcaaattcagttttcatgatctgaagaaatgatggaatggggagtgtagagaaatgagagtctgtatgattctggaacagagacatcagaaggaaagactggtgaaaagatgtatctttgtatattaatagctgtaatgtagcttcctgatgcttgactaattgaggtgtcaattctgacttgagaatctttttcatgaatgatttt

SEQ ID NO: 1745 - DNA, 237 bp, Homo sapiens
ctgaccaccggcaatggcctgttcctcagcgagggcctgaagctagtggataagtttttggaggatgttaaaaagttgtaccactcagaagccttcactgtcaacttcggggacaccgaagaggccaagaaacagatcaacgattacgtggagaagggtactcaagggaaaattgtggatttggtcaaggagcttgacagagacacagtttttgctctggtgaattacatcttcttt

SEQ ID NO: 1746 - DNA, 462 bp, Homo sapiens
ctggaggactgggtgtggagagaaagggttatttaggaatctgaattgatgacaccctgtggtcagctctagtcaactgaacttgagaaaacataaagtaaccagcagatttcaatattaaaaagaagtggttcctcctaaaaaaggtattagatcatagagttgggattagggtaggggatacctattaatctgggctggaaaaaaagtttgtggagaaggggagttgtattgttttctcacaagaggcaaacttcagccaaacaatgaagagatagtagggagggagatgtgtggtagaccaaagactttctgattgctgataataacaaatttagcagctctctacaagtcaattaaaataccattctctgagacattttcagagaggagctaactaacacccacccaggggggaaaaatcattctacattaacaaggcactcactggttcacagcctg

SEQ ID NO: 1747 - DNA, 248 bp, Homo sapiens
ascgtggkcscggcckaggtctggaagatggccgcactctttctgactacaacatccaraaggagtcgaccctgcacctggtcctgcgtctgasaggtggtatgcagatcttcstgaagaccctgaccggcaagaccatcactctggaggtggagcccagtgacaccatcgaaaatgtgaaggccaagatccaagataaagaaggcatcccccccgaccagcakaggctcatctttgcaggcaagcag

SEQ ID NO: 1748 - DNA, 285 bp, Homo sapiens
gcagtgccaagatcactcagcactcaggaaggggcacgtgcggcacttcccgtgtggaagccgcccttgcttagcgtccagaggctggggtgctccagccacgctgctccccggcggccactcactcgagaagggatagacaagtgctgtttctgcacatcactcactgactttcttgtgtttcaggtcttgtcagcaagatttgtcctgttgagacactggtggaagaagccatccagtgtgcagaaaaaattgccagcaattctaaaattgtagtagcgatgg

SEQ ID NO: 1749 - DNA, 474 bp, Homo sapiens
cggccgaggtttgcatatcattccatccttcgggtaactatctcatcacagcttcttcagatggtacccttaagattctggacctcttagaaggaaggctcatctatacacttcaaggacatacgggacctgtctttactgtttcattttcaaaaggtggagagctatttgcatcaggaggtgcagacacacaggtcttattatggaggactaactttgatgaattgcattgtaaaggtcttaccaaaagaaatctcaaaagattacattttgattcaccaccacatcttcttgatatctacccaagaacaccacatccccatgaggaaaaagttgagactgtagaaattaatccaaagcttgaggtaatcgatttgcagatctctactccccctgttatggatatcctttcttttgattctaccacaacaacagaaaccagtggtaggactctgccagacaagggtgaagagg

SEQ ID NO: 1750 - DNA, 355 bp, Homo sapiens
aaaatagaaaaatacaagttcttaaatgcctaaaatttctccccaaataaatgttttcttagttttaatgaagtctcttcatgcagtactgagctccaatattataatgtacacttccttaaaaatctagttttgccacttatatacattcaatatgtttaaccagtatattaaccagtatattaaccaatatgttaaacttcttttaagtataaggcttggtattttgtattgcttattgcatgctttgatcatacaaagacacaagtaccagaactagtgattataaatctagcatagcatctgtcaactttagtcatgtacagcctagtgcaacagactcgaactttttttt

SEQ ID NO: 1751 - DNA, 293 bp, Homo sapiens
aaaaggatatttaagtgagcattttctagttcatatgaaaataaccatagtacaggatgatttctgtccacacaaaggttaaattagattgcacagttaattttcacttatatttatggtactattatgtgggtgatgcctttttcttttaagcccagtacatatattatgcctgcctaagttctgaactggggctgtatttcagtagttgtagaattattgatatttagttttgatagctaatgtttaattgtttggatctgcacagtttggtttttgcacaaaagtcattt

SEQ ID NO: 1752 - DNA, 305 bp, Homo sapiens
ctgccccattcttttaacgttgtagggcctgcccatggagcggaccctcctctttgggcctcgtgagcttttttgcttatcatgttccatttcgtgccgctttcccccttcaagatgccatttggagggtaggggatctgcttcccactgtgactgggctatgggattctgactaccttgcttacagattcatggtttgataaatttgttgtattcaaaaacttgaaatgcaggacgccattaagtgtctgtttatatttttggaatatttgtattacttacaattaattaataaaagtgggttt

SEQ ID NO: 1753 - DNA, 352 bp, Homo sapiens
cctcagactcgcttcccatcctggcatagagtgggggatggctggagggtgtctataggtacagcccgctctggctgctgccaggtgggcccctgccaggggtcctcacccctgtccaccctgtgcctggctgtccctgcacccagatacagcaacatggcctgtacccagcagagtggtggcaccaccatggttacagcggatgccccgagactctgcttggtaaacgtggcagagcagaatgggaggctggaccctgaggaagggcccctctcctggcatctgtctcttgctacctaagcctgtgcctctccctaaagagctgcctccctgctgccgagccctggtctgg

SEQ ID NO: 1754 - DNA, 182 bp, Homo sapiens
ccagagccccagtgagtgcccacggaggcccccagcacacccaacgtggcttgatcacctgcctgtccagctctggtgggccaagaacccacccaacagaataggccagcccatgccagccggcttggcccgctgcagggcggcctccagctcggacaacttggcgttggcatccttaatgg

SEQ ID NO: 1755 - DNA, 166 bp, Homo sapiens
aaatctcmtaaacaaggcacctctgtgccagcagtgagaccgtgacagcaagaatgtactcctcaggacacctgcccgctctttccctggaataacagcctctgagtggattctgcatgttatgtgatttgttctgttcatcgagagggctcccaaacatctgcag

SEQ ID NO: 1756 - DNA, 534 bp, Homo sapiens; identical to SEQ ID NO: 675

SEQ ID NO: 1757 - DNA, 93 bp, Homo sapiens
gtgtcacagccaggaggggttacttcacaggacagtgaggtcagcaggatcagcacagggacccccttaccaggccagccatgttccccacag

SEQ ID NO: 1758 - DNA, 304 bp, Homo sapiens
ccaccccggagatgacacgaggctcacatgactctagacacttggtggaaagtgaggcgagaaaaacaatgacttgggccaattacacgactgcaaagctagagctgccaacagggctccagggagcttggcttctgtagaagttctaaggaagcggtacgaactccacggcggtggggcgctaactagcagggacccctgcaagtgttggtcgggggcctcgagctgcctgagctgacacgaggggaggggtctgtgtagccaacaggtgaccgaagggcttgcctgcccacagcttacttgg

SEQ ID NO: 1759 - DNA, 208 bp, Homo sapiens
cctggcgggcactgctcaggaagaagcgtgtcagaaaatgcaaggcccgtgggagactggtcttcactctcaatgcagccgccacatagatctcggccagcgtcgccacagacacggcatcccctgcacactctgccaggttcagggcactcagcgccaggttggtggcagtgaggtgcccgcctgtgtgcttccccatggtgtgcag

SEQ ID NO: 1760 - DNA, 411 bp, Homo sapiens
cctggcgttgtggtactgccgggtaacgctgtcgtttccattgagcctgaactgatgggtgaggtcgtagattctccaagaagaactgaggttgtggagcgggcaggtaggactattgttcccgttgtttcttggctgctgtgggatgctgttgattcctcactacggcctgaggttgtggagctgtcagggaagtgtgttgttgcagttgagcccgggctgctgtggtagctggtaggttcttcaacaagggcagatgtggtgctaggagctgaagatattgtgtgtgttgtgctgctgtgggaagttgttgattcttcaccacggcctgaagttgtgtcgctttcagggaagtgcattgtttgagttgagcctgggctgctgtggtaggtcgtagattcttcaacgagg

SEQ ID NO: 1761 - DNA, 426 bp, Homo sapiens
aaaaggtagttagcatttaatgaaactccctccatgtggcttcaagccaccaggacacaggcccccccaacactcttaatcttctcctcagctcttctgctgaagaatttggccttcacgatgacaggctgctttgggagctttccctttcccagaactttgtagtagcccgatcgcaccacatcaatgatgggagcagccccagtcttgtctttagcagcattcacccgtgtctgttcactgaccaaagtccacaatttgtcaaggttgacagttgggcagaagctctggttcctctttaagtggtaatgcttcataccaactttcccaaagtagcctgggtggtatttgtcgaagttgatccggtggtgatgcagaccaccagcattaccgcggccgccggggtgcttccggtgcttgcctatg

SEQ ID NO: 1762 - DNA, 174 bp, Homo sapiens
ctgcgccgggctgcttacttgaacatgtcagaagacccttctcacccttccatggccctcaacacccgctttgctgaggtggagtgtttggcggaaagtcatcagcacctgtccaaggagtcaatggcaggaaacaagccagccaatgcagtcctgcacaaagttctgaaacag

SEQ ID NO: 1763 - DNA, 238 bp, Homo sapiens
ctgaccccttaggagcctcaggaattccttttaatgcaagatagatggcaagagctggctttttggttaagtcagccagttcggaaacccatcagggagaagttatcaggtgtcaacttgtaaggcagatgacattcatcaaaagcatcttaagaagtagcagtgatcacagaaaggaagcaattcaggatttccactagcaacaaattgcattaaccatgtctaggccatttgacag

SEQ ID NO: 1764 - DNA, 152 bp, Homo sapiens
kgccaccttygatgccatttctaagacctacagctacctgacccccgacctctggaaggagactgtattcaccaagtctccctatcasgagttcactgaccacctcgtcaagacccacaccagagtctccgtgcagcggactcaggctccag

SEQ ID NO: 1765 - DNA, 168 bp, Homo sapiens
cctcagtcaggaatcaacaactttccacagtaagccaggctcaactgagacaacactgtcccctggcagcatcacaacttcatcttttgctcaagaatttaccacccctcatagccaaccaggctcagctctgtcaacagtgtcacctgccagcaccacagtgccagg

SEQ ID NO: 1766 - DNA, 134 bp, Homo sapiens
ggagaagcaagcaggcgaatcgtaatgaggcgtgcgccgccaatatgcactgtacattccacaagcattgccttcttattttacttcttttagctgtttaactttgtaagatgcaaagaggttggatcaagttt

SEQ ID NO: 1767 - DNA, 283 bp, Homo sapiens
aaaaatatacaaactgtgccctttatactaaagtgcattcagtcgcaatgtttaagcccctaaattccttctgtatgttctctaattccaaaatagtgtgtaacaatatactactaatcatctatctaccttaatattgccttttggggatacagtagaatctgggctattatcaggtggaatatttccccagttacaagccttacagcacttatgcatatcatcactgctaaaatgaagaatttaagtaaagttatctctagtatttagaatgtgttttttg

SEQ ID NO: 1768 - DNA, 190 bp, Homo sapiens
ctggcacaacaatgaaagtgtcagactttctgaaagtactcgagaaataatgaataaattcttaatgttttcccctccaccgccctttttattctccaagattaggaattactacggattaggtttttgaaaataaagtttcctttttggaaaatggtctacattcagaaatgtcttagaacaagcattt

SEQ ID NO: 1769 - DNA, 201 bp, Homo sapiens
cctagtacaatcttgggaacagggttactgtatactgaaggtctgacagtagctcttagactcgcctatcttaggtagtcatgctgtgcatttttttttcattggtgtactgtgtttgatttgtctcatatatttggagtttttctgaaaaatggagcagtaatgcagcatcaacctattaaaatacattttaagcctttt

SEQ ID NO: 1770 - DNA, 329 bp, Homo sapiens
cctgcaggggatggaaccttccagaagtgggcggctgtggtggtgccttctggacaggagcagagatacacctgccatgtgcagcatgagggtttgcccaagcccctcaccctgagatgggagccgtcttcccagcccaccatccccatcgtgggcatcattgctggcctggttctctttggagctgtgatcactggagctgtggtcgctgctgtgatgtggaggaggaagagctcagatagaaaaggggggagctactctcaggctgcaagcagtgacagtgcccagggctctgatgtgtctctcacagcttgtaaagtgtgagacag

SEQ ID NO: 1771 - DNA, 259 bp, Homo sapiens
ccagggccaggcatcgcagtgtgtcgctgccactaccccactctcgaatgacagacatgatcttctgtttgactccagaggtcataggaaccttagtacttccaactcgaatgtgggtgcacctgtcaatgacaccttcaggagcacccttcacaaacatcttgctcattgatgtcctgcttggtttatttggtgtacagtaaaccgacattgactttctgtcacgtgaaaactctagagtgaattcctttttcatcag

SEQ ID NO: 1772 - DNA, 187 bp, Homo sapiens
cctggaaggggctttggcaaataactaagccagccctctctttgtaaaaaggaggaaaagtatctgaagtgacttaccaaaggcttgttagcagagatgtctggattaaaatccagatattgacaaattcacccccaaatcccatctctagtttcatggcccacccactaaatcatgtgctcctttt

SEQ ID NO: 1773 - DNA, 229 bp, Homo sapiens
ctagacatggcgcttgccagcgtgttggagagaccgctaccggtgaaccagcgcgggtttttcggacttgggggtcgtgcagatctgctggatctaggtccagggagtctcagtgatggtctgagcctggccgcgccaggctggggtgtcccagaagagccaggaatcgaaatgcttcatggaacaaccaccctggccttcaagttccgccatggagtcatagttgcag

SEQ ID NO: 1774 - DNA, 484 bp, Homo sapiens
  misc_feature 423: n = A,T,C or G
gtttgttctatcagacttaaccttttatttcctgtccttccttgaaattgctgattgttctgctccctctacggatatttatatcaattcctacagctttcccctgccatccctgaactctttctagcccttttagattttggcactgtgaaacccctgctggaaacctgagtgaccctccctccccaccaagagtccacagacctttcatctttcacgaacttgatcctgttagcaggtggtaataccatgggtgctgtgacactaacagtcattgagaggtgggaggaagtcccttttccttggactggtatcttttcaactattgttttatcctgtctttgggggcaatgtgtcaaaagtcccctcaggaattttcagaggaaagaacattttatgaggctttctctaaagtttcctttntataggagtatgctcacttaaatttacagaaagaggtgagctgtgttaaacctcagagttt

SEQ ID NO: 1775 - DNA, 268 bp, Homo sapiens
aaagagcttagggacaggcccaacctataaaaattcttctggaaggaagaaaacacacacacacaaactgcgaatactgcttaaattcccactcaccacattcagtgtcatataaccagatcttaggcaggagcagcagagtggagcatgttagatcaataaagaaatgtcaggccaggcacggtggctcacacctgtaatcccagcactttgggaggtcaaggtggtggatcacttgaggccaggagttcgagaccagccagcctgg

SEQ ID NO: 1776 - DNA, 358 bp, Homo sapiens
ctgggccgcacccttgggctctatgggaaggaccagcaggaggcagccctggtggacatggtgaatgacggcgtggaggacctccgctgcaaatacatctccctcatctacaccaactatgaggcgggcaaggatgactatgtgaaggcactgcccgggcaactgaagccttttgagaccctgctgtcccagaaccagggaggcaagaccttcattgtgggagaccagatctccttcgctgactacaacctgctggacttgccgctgatccatgaggtcctagcccctggctgcctggatgcgttccccctgctctcagcatatgtggggcgcctcagtgcccggcccaagctcaagg

SEQ ID NO: 1777 - DNA, 377 bp, Homo sapiens
ccatgcctccttttaataatgaggtataatctgatgctaacaatgcctgttccttcctgggttatggggctgatgaacggtgtaggcagaaaacaattcaactttctgataagaatcacacacacacaaaaattattgcactgaaaaacaaacacttaaaaataaaaaactcagcccaaccagcaaagggccaactaaactcttcggaagtgctgtacttcctgccctttggagagcgtcttgaccttcctggtgttctgttgaatttggtccattattaaatgtcccgaagtgaaagagtccaaaaggacactgtaggctctttaaggctaagtcttcccggtgcttctgtgagataaattatctccttggacctc

SEQ ID NO: 1778 - DNA, 305 bp, Homo sapiens
ccacaactgccaaatgggcttgaagctgcttacgaatttgccgacagagatgaagtccggtttttcaaagggaataagtactgggctgttcagggacagaatgtgctacacggataccccaaggacatctacagctcctttggcttccctagaactgtgaagcatatcgatgctgctctttctgaggaaaacactggaaaaacctacttctttgttgctaacaaatactggaggtatgatgaatataaacgatctatggatccaggttatcccaaaatgatagcacatgactttcctggaattgg

SEQ ID NO: 1779 - DNA, 380 bp, Homo sapiens
gcccaagagaaaggctgaaggggatgctaagggagataaagcaaaggtgaaggacgaaccacagagaagatccgcgaggttgtctgctaaacctgctcctccaaagccagagcccaagcctaaaaaggcccctgcaaagaagggagagaaggtacccaaagggaaaaagggaaaagctgatgctggcaaggaggggaataaccctgcagaaaatggagatgccaaaacagaccaggcacagaaagctgaaggtgctggagatgccaagtgaagtgtgtgcatttttgataactgtgtacttctggtgactgtacagtttgaaatactattttttatcaagttttataaaaatgcagaattttgttttacttttttttttt

SEQ ID NO: 1780 - DNA, 146 bp, Homo sapiens
ttggtgtattgaaagctttcctttaacattttcacctgctcattgtgattcctccttttagtctaatatctttccaggtcatacttgtttttaatcattaaatattttcttcctggttttggagactaagctgataaacttttttt

SEQ ID NO: 1781 - DNA, 505 bp, Homo sapiens
  misc_feature 480: n = A,T,C or G
ctgcggtcggccacagtttgtcatgctggatggcggaggctcactcagcttcacattatccggaggccctggatggaagactcgagggtcttgaaatcccaaattgtcatggctccatcgatgccagtagtgcaaaatttgcgacaatcttgcttgtccacctcataaatagagacttgagtgatgctattctggtgcagcgtctccaaggccgtgttgcggtcctcagctgaaatatcccagaggtgatgtggaaacaagagcaaatgcttgcagatcactggcttctcagtgtcttctccctcgcaggtctcatcaaaatcccaaaagtccttaggagtaacacagattgtactggcattaagtgacaaaatgtgcagcctgtatttgactgaggaggaaaggaaatggcacctaggcagcagcgctagggtcagcaaggagaccggcctagggtctcagtaaagcagaactgtttcnaatgggactagaccggggcatgtgc

SEQ ID NO: 1782 - DNA, 548 bp, Homo sapiens
ctgcttaagattcccacttaaagctgcataaattgctctctcgtatctattaaaaagctcatcttctgccattctccagcaacttattttccaaatgcgtctatatggattcccttcaacaggttctaattctgttcctccattaacattagggtcatggtacagtttccagccttcaagtgttgcagctctccatgcttgaccacagcgtttacagagtcgttgtgcctcttctgtcattccagcacggattagagtaaagagatatttgagtaatctaacttcatcttctctatccagatcatcaaggggcattttctgtcttatgggagcatcagggtccaattcagtgacaagcggacgaacacttccaacgtaagaagtcagacctgcccgggcggccgcccgggcaggtaaatacagtatttttctcataaaaaaaaaatccaggaagtgcctaactccatggtttctataccatatgtacatgaaagctgacagagagcctgacaaatgttctggatgtaacagtatgaacacctatgagc

SEQ ID NO: 1783 - DNA, 292 bp, Homo sapiens
ccagacatcacctcagatctgagaccagcgtcttccatctctcagagccttactcccaaagtacctgctcactgttccgtgttgaacaattgccggtgtttcctctcttcactggtttccatgagtacccttatatttcacaactttctgttcataagttatagtgacattgctctttggtaaaaatgcctgctttccaatactttgattgcatattagacattctcaacagggcggcagtctagtgttgaaagttttatttttccatttttcttttaagtaaatttttttt

SEQ ID NO: 1784 - DNA, 94 bp, Homo sapiens
ctgcctcagtacttggggaccttgctgtagtcttcggaatggacgtgccggcacaagcagatggacaggaccatccccaggagctcgatgatgg

SEQ ID NO: 1785 - DNA, 362 bp, Homo sapiens
aaataaacaatctgagtggaaaaaaaaaaaaaaaaaaaaaaaagcttgtggccacgtgagccacggccacggccgcataggcaagcaccggaagcaccccggcggccgcggtaatgctggtggtctgcatcaccaccggatcaacttcgacaaataccacccaggctactttgggaaagttggtatgaagcattaccacttaaagaggaaccagagcttctgcccaactgtcaaccttgacaaattgtggactttggtcagtgaacagacacgggtgaatgctgctaaaaacaaractggggctgctcccatcattgatgtggtgcgatcgggctactacaaagttctgggaaagggaaagc

SEQ ID NO: 1786 - DNA, 167 bp, Homo sapiens
ctgtggttccaggcacaaagtggtagcggccagacctcttcacgggctctgtgggtgagctcagtgtccgcagcagcttggcgccagtctttgtgatcacacatgcgtccacattgcccccggagcccaggtcacccaagatcccggcggtgacggcttccaccagc

SEQ ID NO: 1787 - DNA, 366 bp, Homo sapiens
aaagttcttgttaaattagccccaaagtaatttttgggaatacagataggggaggaaacaaaacaaaaaatagaacatcgactcactgattaactgttttggtagcagattcagtagtcttatactggatcagtttggatccaccataggcattcaccatttctttcaagtcctgaatatacagtatttgcagcagtgagtaaaccgcactagagttcagtgaataaacccattttctccaagaattcctgaatgttacagtatgaaatccagaaacattatgcaggcttctaaagtaaaaaatatccaataactgtaaagatgtttatttcttaaaccttttgggttgtgggatggaggctgtca

SEQ ID NO: 1788 - DNA, 521 bp, Homo sapiens; identical to SEQ ID NO: 1433

SEQ ID NO: 1789 - DNA, 437 bp, Homo sapiens
ccttattttgaactgcctcaggaccccactggagagcacagcatgccttactactgggtcatccttggtctatgtgctctgtactggaggctctgttctgcctcttatcagccaggtcaggggcacacatggcttaagtgacaaagccagaggagaagacaaccctgacagcatcacgctgcatcccattgctagcaggattggcaactcttcagacggagctgcgcttccctgcagtctagcacctctagggcctctccagactgtgccctgggagctctgggactgaaaggttaagaacataaggcaggatcagatgactctctccaagagggcaggggaattttctctccatgggccacaggggacagggctgggagaagaaatagacttgcaccttatgtcatgtaaataattgattttctagttcaagaaga

SEQ ID NO: 1790 - DNA, 176 bp, Homo sapiens
aaattcacataaaaggtgaaagctcctggttcagtgccatggcttcatggcattcagtgattagtggtaatggtaaacactggtgtgttttgaagttgaatgtgcgataaaattattagccttaagattggtaagctagcaatgaatgctagggtgggaagctggtgagccagtgg

SEQ ID NO: 1791 - DNA, 271 bp, Homo sapiens; identical to SEQ ID NO: 1515

SEQ ID NO: 1792 - DNA, 478 bp, Homo sapiens
cctggggcttctgtcgctcaggagttcaggggtggacgcagaaatgggggaaggagagtggctacgtagagagtgagagcgagattcctaaaaagatgcacagagagaccctcagagaggccaagaaagatggtgagagggtagggaaggagagggagggagagagagagagagagagagaagcagagggaatgggttgcactggctgaggatggtggaggagccgtctcactcccttcctaatgtctatagatcaataacgagggaagaaaggaggacagggagctgatggaaacacagcttgccaactgtacccagtcccccaacaagcaaggtagctccagtccttgcctccctgcctgccccgctcctctgtgtttaggggtcatcctttgatgggaggttgcaggggacccaggtgggggtgataaatgccagagggctgcaccatttccaaagggcaagaagtcagagggcg

SEQ ID NO: 1793 - DNA, 219 bp, Homo sapiens
ccaagggtcatgatggcargagtaatcagaggygttcttgygttgtgataagggtggasaggttaaaggagccacttattagtaatgktgatagtaraatgatggctakggtgacttcatatgagattgtttgggctactgctcgcagtgcgccgatcagggcgtastytgagtttgatgctcaccctgatcagaggattgagtaaacggctakgctag

SEQ ID NO: 1794 - DNA, 148 bp, Homo sapiens
gtggagatcaagcccgagatgatcggccactacctgggcgagttctccatcacctacaagcccgtaaagcatggccggcccggcatcmtggccacccactcctcccgcttcatccctctcaagtaatggctcagctaataaaggcgca

SEQ ID NO: 1795 - DNA, 311 bp, Homo sapiens
ctgctcccgcacgttgttggtggtgttgtcctcagaggctgagtgtgtgtggctgcccggcttccgccgcttccgcaggcaccagtagaaggccgtcaccaagcaacagatccaagccacagttaagacagagctcagcaagggaacaaggaaatctgttctgttcttcagaggccgcctctgaactcttacttctgcaacggcagcaatcagcgagctgtttccatcacgtttactaacaagatcgattattttgtcagtgatttccttgatcgggttcccatcatcccgtatatcttcagcagaaatgg

SEQ ID NO: 1796 - DNA, 212 bp, Homo sapiens
aaatgttaatacaacaggattttttttttctttttgtaagagaaagcaaatctgtacaaaaatactctggttgcaagaaaagctagggcacactgttcaactaagagtagtttagctgttggaaaaataagagcatttaattttatctaaaaatatgtataaatcccctcaaaatggtaatgaatcatacacagtacatactaaaaatattt

SEQ ID NO: 1797 - DNA, 185 bp, Homo sapiens
cctccaggattgctttgttgttaatgttgctttggctaaatgggctgttttattcttccatatgacttttagaatggttttctttttctaattccataaaagttgcatttatagtttgagagaaatagcacttaatctgtaagttgctttaggcagcacggacattttaattatatcgattcttt

SEQ ID NO: 1798 - DNA, 452 bp, Homo sapiens
gtgagctgcttccccaggagcagcggagcgtggagtcgtcacttcgggcacaagtgcccttcgagcagattctcagccttccagagctcaaggccaaccccttcaaggagcgaatctgcagggtcttctccacatccccagccaaagacagccttagctttgaggacttcctggatctcctcagtgtgttcagtgacacagccacgccagacatcaagtcccattatgccttccgcatctttgactttgatgatgacggaaccttgaacagagaagacctgagccggctggtgaactgcctcacgggagagggcgaggacacacggcttagtgcgtctgagatgaagcagctcatcgacaacatcctggaggagtctgacattgacagggatggaaccatcaacctctctgagttccagcacgtcatctcccgttctccagactttgccagc

SEQ ID NO: 1799 - DNA, 217 bp, Homo sapiens
ctgaaacaaggaggtacttgaatgatttctagttcataaaaaatgttattgatatcagaccccattctagtatcaaggagttatgaagctttgatccatgtcctcaaggaggacagaaatttattctaactataccatcaagcctgtttcccgggaagagaaacttctgtacagagggctttttaggagctgtgagttcgggagtctaggatcattt

SEQ ID NO: 1800 - DNA, 150 bp, Homo sapiens
ccaaggccgctagggtccttacccctcaggatcactccccagccctttcctcaggaggtaccgctctccaaggtgtgctagcagtgggccctgcccaacttcaggcagaacagggaggcccagagattacagatcccctcctgtaagtgg

SEQ ID NO: 1801 - DNA, 363 bp, Homo sapiens
cctttgtccggcaccctgcccgcaggctgagctcagccccaggccctttcaggcatctagacactcccatagcctgtcaggctggggcaaggagatcccaggtcacacatactccttggaagagttggacttagggtaagagcggggtgcacggtacccagccttgctctcattcccaggacaggaacaggagagcagtgcacctcccaggatgactagggcagaccctgcccagccaataaagatggcagggccaaactcatacttaatgttggtagggatcaaagggttataaaagtctgtgacaatctgatggcctgcgtagtacacggcagtgatctaaaggacatgacctccgagcag

SEQ ID NO: 1802 - DNA, 265 bp, Homo sapiens
ccaattgatttgatggtaagggagggatcgttgacctcgtctgttatgtaaaggatgcgtagggatgggagggcgatgaggactaggatgatggcgggcaggatagttcagacggtttctatttcctgagcgtctgagatgttggtattagttagttttgttgtgagtgttaggaaaagggcatacaggactaggaagcagataaggaaaatgattatgagggcgtgatcatgaaaggtgataagctcttctatgataggggaag

SEQ ID NO: 1803 - DNA, 130 bp, Homo sapiens
ccagtctggtctcgaactcctgacctcagatgatctgcctgcctctgcctcgcaaagtgctgggattacaggcgtgagccactgcacccggcctcttttttttttttttttgagacagggcatcactatg

SEQ ID NO: 1804 - DNA, 194 bp, Homo sapiens
ctgggttgctccttgcagagatgcgcctgtgtaacgcgagcagaacctaaagagcccgggaaacactgggcagtcatcgcchacgttgaaggcattaagactcttggtgaagccttgcatattggtggggctgactctctgcaggaagtcgatgtagtcctcggagtggaagcggyacatgtcatgctgggagg

SEQ ID NO: 1805 - DNA, 166 bp, Homo sapiens
aaaacctctgcaattattagtttattagtatcatccaggactcagatgttcagtattcctcctgaaattacataaacaaatgcaaatggaaagaatccaagtctaaattatataacaaaacagcactccatcacaaaagcgtgtaaaattacaagaacgctatttt

SEQ ID NO: 1806 - DNA, 328 bp, Homo sapiens
ccaactcagcatgcttgggcttattgtaaacaatccaagctgagtcgatctgggaggcaggagctatcttcaggccagcagccacaccattatgaaagctggcccagcttgtcatgttgggaggcacatcgatgtttccactattaaggtctactgttgtgttccgaggaggggcacgcccagtcagattcaatttaggaataggcaatggctctgttggaacaggatggtacgaaaacaaggtaaacattcctcgtcctacaggaagagccatagttcgctgacacaattggagcaatctgttttccttttcctcgatgaactcgtg

SEQ ID NO: 1807 - DNA, 279 bp, Homo sapiens
ctgytcasggtgacagtgascagatccagacaccagatccagctaggctagatgtacagtatctaacttgatctgaactgaacctgttttccttgatgatgcctaaaactacatccatagtttctggtgaacctgtaatacagwtmtgaaagtacagttttatatwataagatgctgatctctttattcttccaagtaagagtgctartgaacaaattgtgttacttgccttgggattttttgaacgtttgtaaaatgctgtcttcctagtccawacag

SEQ ID NO: 1808 - DNA, 459 bp, Homo sapiens
ccatcaaagaaatatgcattaagtcaacaatgaggaactacagtgtatctccacagcaaatattattcaacaaacaaatatctttttgaatgaagtctcccaccagtgaaaaggatatagggcaaagagcattttcacatactgctggtgaggggcaaacaacacaagtcttttgggaagcaatttagtgaaatacagtccaagcctccaatgtgctcattataccctttgatctggtaattccattcctgagagtccagcttaagaacatattctaaaatagagaaaatgctttttatgcaaagaagctgatgttccctgcagcaccattcaaaacagtaaaggactgaaaaccatctaaacactcctaattagtgtgctggataaataactttatggtttataaacatggcaaagtatgcagacattaaaagtgttttcggccgggtgaggtggctc

SEQ ID NO: 1809 - DNA, 615 bp, Homo sapiens
  misc_feature 581: n = A,T,C or G
aaacatcacctcaaaatagatgctcaaaataatgccctcacaatagcctttgtaaaatgtattcagatgtttgataaaaaataatggtggctttatattacagtagtgctcattagcaccactataattaagggtctaccaagtttccagcaaaaccacctgtttcttaggagtttcaccataaaagatcacattggctttaaccagttgggtagcgcacaaaaaagcaatttttatcagttgctggtgctttttttgtactactatattatcaaaaaatttttcattagatcttcaaaatccagcttctataaagtaaatcaaatcacctcatgacttagattttagaacaaagtagagacatctgcagttatcagtaaattgccacctttaatccatcctacagtgccctgtgaaagggtcacagaaagacagttatgactgtatgaaaacatgattcttgatacagaatcaaaagttactttcaatttcctttgcttttataaagtccacgataacaatacttaaatgcacttttttttcctgtgatataattaaaacccagtgttatttcagttgancttaaaatagagtccctggtctgaatcaracttt

SEQ ID NO: 1810 - DNA, 244 bp, Homo sapiens
ccttggagagctccttgtggcaagaggttgggcttggtaggcatcgtagtagttggagcgatttctctgggatgagcaggaaaagcagaggatgattccagctatcagggagaacagggaagaaataatgcccaagtaaagagcctctccaatctcaaatttcatgctgtcaggcaccagtggtgagtagaagtcccgtaggatcccatgaagattccaggcaacaggaatgaatcccaggagg

SEQ ID NO: 1811 - DNA, 181 bp, Homo sapiens
ctgctaatgccatttgctgaggaacaaggatggggaggatggcgagggcctggcccccagggcggccacaccagaaggtcggagaaaggcccaaggcggatgccacgcccagcagtggtgactgccccccactccttttctgagtctatcagcattgtttggttttcttcttgttgctttt

SEQ ID NO: 1812 - DNA, 520 bp, Homo sapiens
ctgctgggatgaatgccaagtttttcagccataaggtagcgaaatctagcagaatccagattacatccacttccaatcacgcggtgtttgggtaatccacttagtttccaggtaacatacgtaagaatgtccactgggttggaaaccacaattatgatgcaatcaggactgtacttgacgatctgaggaataatgaatttgaagacattaacatttctctgcaccagattgagccgactctccccttcttgctgacggactcctgcagttaccactacaatcttagaattggcggtcacagaataatctttatctgccacaattttaggtgtctgaagaaataagctcccatgctgcagatccatcatttctcctttaagcttatcttccaaaacatccacaagagcaagttcatcagccagagactttcccagaatgctgatagcacacgccataccaacttgtccaacacccactacagtgatcttattgtttggaactgttgcctcttcttccgcaa

SEQ ID NO: 1813 - DNA, 338 bp, Homo sapiens
ctgaggacctatagcgttgwgcccatgacctccagtgatcccagggcaccgccgtgtgaatataaagattggctgacraaaatgtsaggaaaacatgatgttggagcttacatgctaatgtataagggcgctaatcgtactgaaacagtcacagtcttttagaaaacgagaaagtaaagtgcctgctgatctcttaaagcgggccttcgtgaggatgagtacaagccctgaggccttcctggcgctccgctcccacttcgccagctctcacgctctgatatgcatcagccactggatcctcgggattggagacagacatctgaacaactttatggtgg

SEQ ID NO: 1814 - DNA, 263 bp, Homo sapiens
aaataatatacgaatggtgctattaatattgctaaaatcaacgtgtgaagtgtgttgtggaagagacctgtaagtatggggggggggcgatattttatcagaccattttgtaaataaaggcagaatttgtgttgaagattcttatatgaataaccttcctggatttgtttagttttgcaccaataaaactgtgtactactgtttgttggtttaagagtagcagattggaatataagaagccagattagactctaaaattgtgg

SEQ ID NO: 1815 - DNA, 210 bp, Homo sapiens
ctgagcgggaccgtttcacacctgacacatggggctctgcacttgagtagggatcatctcctgacccaaagccatagccttcctgcacctccatgggctggctgctgccagagccctgcttgctcaggggccctggggctcttggaggggccatgggtgcagggcctgttgagttagtgccaggacgctctgccacaatcttgccaaagg

SEQ ID NO: 1816 - DNA, 161 bp, Homo sapiens
aaacttcgcttccgaaaaaactttcaggccctgttggaggagcagaacttgagtgtggccgagggccctaactacctgacggcctgtgcgggacccccatcgcggccccagcgccccttctgtgctgtctgtggcttcccatccccctacacctgtgtcag

SEQ ID NO: 1817 - DNA, 647 bp, Homo sapiens
  misc_feature 607: n = A,T,C or G
aaaaaaaaacacacttccgctgggcaggtttagaggtttattatcagtctgtgcataactaaaagttcaaagcaaattcaattttgcttaagggaacattgtaaagtaacaattcttggtattacatgcctcgtatgatccatttcaaaccacagagaattacacctttgtgtcactgtttcaagagacaaacagatttgaacagctaaaacatcttaaaaatgcaccaagcttatgaagtctcaaacaaaacttgaattttctgtacatactcctgtcaaatgaagtaatttcctgtacaccacttctcttgcaaactgtcttctatttcctttcatttgacctagatcgactacgagacctagagaaggatcgggacggcttgtgatttctctcccgagacagcgatctctctcttctcctatctctagaaagggacctgctccggctgcgagagaagcttctccttcttggagatctgcgacgaggtggaggactcctcctacgataatcatctcgagggcgacgaccccaagagggaggtgggccacgatttctacttcttttttcaccattcgacagttccactcttacacggcagccacanagtgttcttccatctagctctcggactgcatcagacctcg

SEQ ID NO: 1818 - DNA, 249 bp, Homo sapiens
ctgagctgctttcactctggagatggggccgtggaaccaggggtagcaggacaggaaatggtccgtcttctggcaggccgggtccagcagccccccaggagaagcaccttggttaagggaatctgtgctgccccttggggagctggacgtgctaggctctagggctgagggaatatgcatctctgcttctgtgctctccagcctgcctcggcctgtgcactccgagagctcagccatccatgaattcag

SEQ ID NO: 1819 - DNA, 216 bp, Homo sapiens
ccaggctggtctcgaactcaacctccagtgaaccacctgcctcagcctcccaaagtgctgggattacaggcgtgagccaccgtgcccagccaagatttggggaattaagaaaggaaatacaaacacaactgagccaaggaaardatctgactgataacatcactgcattcagcatccaaagaaatccattacttttacaactttgtatttcttttt

SEQ ID NO: 1820 - DNA, 268 bp, Homo sapiens
aaaatgcgggcaaaactgttccgatttgcctctgagaacgatctcccagaatggaaggagcgaggcactggtgacgtcaagctcctgaagcacaaggagaaaggggccatccgcctcctcatgcggagggacaagaccctgaagatctgtgccaaccactacatcacgccgatgatggagctgaagcccaacgcaggtagcgaccgtgcctgggtctggaacacccacgctgacttcgccgacgagtgccccaagccagagctgctgg

SEQ ID NO: 1821 - DNA, 409 bp, Homo sapiens
ctggaggctgctgtggggaccacactgatcctggagaaaaggggtggagctgaaaaagatggaatgcttgcagagcatgacctgaggagggaggaacgtggtcaactcacacctgcctcttcctgcagcctcacctctacctgcccccatcataagggcactgagcccttcccaggctggatactaagcacaaagcccatagcactgggctctgatggctgctccactgggttacagaatcacagccctcatgatcattctcagtgagggctctggattgagagggaggccctgggaggagagaagggggcagagtcttccctaccaggtttctacacccccgccaggctgcccatcagggcccagggagcccccagaggactttattcggaccaagcagagctcacag

SEQ ID NO: 1822 - DNA, 302 bp, Homo sapiens
cagcrcaagtaggtctacaagacgctacttcccctatcatagaagagcttatcacctttcatgatcacgccctcataatcattttccttatctgcttcctagkcctgtatgcccttttcctaacactcacaacaaaactaactaatactaacatctcagacgctcaggaaatagaaaccgtctgaactatcctgcccgccatcatcctagtcctcatcgscctcccatccctacgcatcctttacataacagacgaggtcaacgatccctcccttaccatcaaatcaattggacctcggccg

SEQ ID NO: 1823 - DNA, 196 bp, Homo sapiens
ccaagagtggtttctaaaatatgagcccatggtatggctgagataccagttgatcataatggagtggggtactgcaagtatttagggctgggcagtagggaggtctgaggctctgaggggaggggctgggtcaacagacaggctcatagagggctcaaggcaggaagtgttttaataatgttaacgagtagcatgg

SEQ ID NO: 1824 - DNA, 518 bp, Homo sapiens
ctgctgcctgtggcgtgtgtgggctggatcccttgaaggctgagtttttgagggcagaaagctagctatgggtagccaggtgttacaaaggtgctgctccttctccaacccctacttggtttccctcaccccaagcctcatgttcataccagccagtgggttcagcagaacgcatgacaccttatcacctccctccttgggtgagctctgaacaccagctttggcccctccacagtaaggctgctgcatcaggggcaaccctggctctatcattttccttttttgccaaaaggaccagtagcataggtgagccctgagcactaaaaggaggggtccctgaagctttcccactatagtgtggagttctgtccctgaggtgggtacagcagccttggttcctctgggggttgagaataagaatagtggggagggaaaaactcctccttgaagatttcctgtctcagagtcccagagaggtagaaaggaggaatttctgctggactttatctgggcagagg

SEQ ID NO: 1825 - DNA, 347 bp, Homo sapiens
  misc_feature 43: n = A,T,C or G
cctcaractcgcttcccatcctggcataragtgggggatggcntggagggtgtctataggtacagcccgctctggctgctgccaggtgggcccctgccaggggtcctcacccctrtccaccctgtgcctggctgtccctgcacccagatacagcaacatggcctgtacccagcagagtggtggcaccamcatggttacagcggatgccccgagactctgcttggtaaacagtggyagagcagaacgggaggctggaccctgaggaagggcccctctcctggcatctgtctcttgctacctaagcctgtgcctctccctaaagagctgcctmcctgctgccgagccct

SEQ ID NO: 1826 - DNA, 195 bp, Homo sapiens
ctgggatcccagcccacaagtgatcagcagagttgcatttccaaagaaaaaggctatgagatgagctgagttatagagagaaagggagaggcatgtacggtgtggggaagtggaagagaagctggcgggggagaaggaggctaacctgcactgagtacttcattaggacaagtgagaatcagctattgataatgg

SEQ ID NO: 1827 - DNA, 230 bp, Homo sapiens
ccaaagattctcattcctgagaagcaaaaattaggtgaggtaacttgtcagaggaagcaaattcagggctcactagagagcacagagcatttgtccatcagcagttcagtcatcgccagctctcctggtaccctcgaacacttcagaaacacacacaagtcaagtccctcgatggctacactaggcgcctatggctggagcctccttggcacgagcgcaccatccgaggc

SEQ ID NO: 1828 - DNA, 358 bp, Homo sapiens
gaaaagtgggaagtacgtcctggggtacaagcagactctgaagatgatcagacaaggcaaagcgaaattggtcattctcgctaacaactgcccagctttgaggaaatctgaaatagagtactatgctatgttggctaaaactggtgtccatcactacagtggcaataatattgaactgggcacagcatgcggaaaatactacagagtgtgcacactggctatcattgatccaggtgactctgacatcattagaagcatgccagaacagactggtgaaaagtaaaccttttcacctacaaaatttcacctgcaaaccttaaacctgcaaaattttcctttaataaaatttgcttgtttt

SEQ ID NO: 1829 - DNA, 327 bp, Homo sapiens
ccaccgggatagccgggggtctggcaggaatgggaggcatccagaacgagaaggagaccatgcaaagcctgaacgaccgcctggcctcttacctggacagagtgaggagcctggagaccgakaaccggaggctggagagcaaaatccgggagcacttggagaagaagggaccccaggtcagagactggagccattacttcaagatcatcgaggacctgagggctcagatcttcgcaaatactgtggacaatgcccgcatcgttctgcagattgacaatgcccgtcttgctgctgatgactttagagtcaagtatgagacagagctgg

SEQ ID NO: 1830 - DNA, 302 bp, Homo sapiens
ccagtgtgtgggtttgttttggggatgatgaaaatgttcttaggttgtgtgtggtgatggctgctcacctctataaaccttttactaaaaaccatggactgggtggatacagtgtgtgaattctctcagtccagtgctttgtttgaaaaaggtggatgatgccaacatcactaaccgccagggagacgcaggccacggccacacccggctcactggagttgtgaggatggaaacaccagcccaccccactcagttcagacctcagcttagatgcaaagaatgtctgggatggggactggcag

SEQ ID NO: 1831 - DNA, 256 bp, Homo sapiens
ccatctcgggtgtggtaggtgaccacggccacagtcaggtggatctccgtgggcgtgtgatcccgggaggagctgatggagtagaacctgggcttcagaatggggagctgggaaagcaggaagccagcagacacccgcagggacgggaactcctctagcacctccaggaatgtggggctgttggtgaacttccacttgctgtactctgagggctggcacagggcctccagcctctgtctctcaggctcttctgtgg

SEQ ID NO: 1832 - DNA, 534 bp, Homo sapiens
ctgtccaatggcaacaggaccctcactctattcaatgtcacaagaaatgacacagcaagctacaaatgtgaaacccagaacccagtgagtgccaggcgcagtgattcagtcatcctgaatgtcctctatggcccggatgcccccaccatttcccctctaaacacatcttacagatcaggggaaaatctgaacctctcctgccacgcagcctctaacccacctgcacagtactcttggtttgtcaatgggactttccagcaatccacccaagagctctttatccccaacatcactgtgaataatagtggatcctatacgtgccaagcccataactcagacactggcctcaataggaccacagtcacgacgatcacagtctatgcagagccacccaaacccttcatcaccagcaacaactccaaccccgtggaggatgaggatgctgtagccttaacctgtgaacctgagattcagaacacgacctacctgtggtgggtaaataatcagagcctcccggtcagtcccaggctgcag

SEQ ID NO: 1833 - DNA, 450 bp, Homo sapiens
cctgacttctgctggcatcaagaggtgggagggccctccgaccacttccaggggaacctgccatgccaggaacctgtcctaaggaaccttccttcctgcttgagttcccagatggctggaaggggtccagcctcgttggaagaggaacagcactggggagtctttgtggattctgaggccctgcccaatgagactctagggtccagtggatgccacagcccagcttggccctttccttccagatcctgggtactgaaagccttagggaagctggcctgagaggggaagcggccctaagggagtgtctaagaacaaaagcgacccattcagagactgtccctgaaacctagtactgccccccatgaggaaggaacagcaatggtgtcagtatccaggctttgtacagagtgcttttctgtttagtttttactttttttgttttgttttttt

SEQ ID NO: 1834 - DNA, 314 bp, Homo sapiens
cctggagtccaataaccaccccctcataccacaccctgtgcatacaccagccaagcctttcctggtctgggaagggaagagaaaaaagacgcaggccacctgggggttctgcagtctttggtcagtccagctttctatcttagctgcctttggcttccgcagtgtaaaccttgcctgcccggaggcaggaggcccagacctgcccgggcggccgcccgggcaggtaatcagagtgccatttttttttttgttcaaatgattttaattattggaatgcacaatttttttaatatgcawataaaaagtttayctcg

SEQ ID NO: 1835 - DNA, 230 bp, Homo sapiens
ccagcaaacttcaagtactggtgggtgatgtgctgaaaacagatttgccattctttgatacttgtgtggcaaatttgccttatcagatctcttcaccttttgtcttcaagctgttgctacatcgaccttttttcaggtgtgctatacttatgtttcaaagagaatttgccctccgactggttgcaaaacctggagataagttatactgcagactctcaattaatacacag

SEQ ID NO: 1836 - DNA, 235 bp, Homo sapiens
aaaggactcctcttattcagagatagattgtcctttccttttatgaaaaaaatggtgataatacagtgatttattcggattacttggcaaggtaaattggcaaccttatagtaccccagatttttggaaatattactaccggtccataaaatacaaaagtctgggaaccactgccatgtacaagtttagttttgcaggctgttaacaaatgttaagtgggaaaaagtttctgtgg

SEQ ID NO: 1837 - DNA, 111 bp, Homo sapiens
cccgaccaagcgccggccctgcccgcagcggcaggatgaatgatttcggaatcaagaatatggaccaggtagcccctgtggctaacagttacagagggacactcaagcgcc

SEQ ID NO: 1838 - DNA, 243 bp, Homo sapiens
cctaggagagggcgggggctgctgtgatccgagagctccctgacgccccaaccttccccgaacgcagctaacgagctcgtgacatccgctgacatcgccaccggtctgctttggagggatctagcgagagtcacctaccccacccctactgccaggggaggggtcgttgcccccacgagggagagaaaaacaaggactataatgcacttcgcaaaatgtaaggggccggcttcacgccagcgg

SEQ ID NO: 1839 - DNA, 227 bp, Homo sapiens
aaaaaatcaaccaaccaatgagcacattcaacgtgattatgagataacaggagtttcaacataagagctgaagaggaagaaggatgaggatgctgcttaagaagtaaaggggcaggtggaacagaaatgagtgggcagaagaggtacaaataagcagcactgggaatggggaggtaatagggctttgggtaaaagtttctccttggtccccctaccctccttccagg

SEQ ID NO: 1840 - DNA, 241 bp, Homo sapiens
aaattatcgttttcctacttaaattttgtttagcttaagacttcttaggacatttgtaaaagcaggttaaatttaataaggtttctgattttttttgtaaccggagatagtttttacaagtgaaataacatttcagctaaataaaacatcgctaaataattgatatttgatgaaaatctgctttgtataatttctgtaaattatccttgttctgaaaaaggtgtaatgccctaatattttt

SEQ ID NO: 1841 - DNA, 379 bp, Homo sapiens
aaacgtgaaaattatagatcttgatattaaatccatcagtgattcaagagatacacctatttgcctaaaacaacctaagatgtattggttatggaatcatgtgttggataggttcttaagacctgtttcctcaaatcttgacacagttttcaagggtggcttattgacttgcacggttgggcagataatccagatttacctaagattgggtaaaaaagtcatctgtgactttgctggcagggcatttgctaagtggagtacaggatctaaaagggttttcttagaaagggcaatattgtccaatgaagtaagcagaaggactctgggttagaagcatctgcacaaaaactggtgagacctactctccactgctctgcag

SEQ ID NO: 1842 - DNA, 326 bp, Homo sapiens
ctgtgctcccgactcctccatctcaggtaccaccgactgcactgggcggggccctctggggggaaaggctccacggggcagggatacatctcgaggccagtcatcctctggaggcagcccaatcaggtcaaagattttgcccaactggtcggcttcagagtttccacagaagagaggctttcgacgagacatctctgcaaagatacagccaacactccacatgtccacaggtgttgcatatgtggactgcagaagaacttcgggagctcggtaccagagtgtaacaaccacgggtgtaagtgccatctggtagctgtagattctgg

SEQ ID NO: 1843 - DNA, 475 bp, Homo sapiens
ctgccaaggagaccctgttatgctgtggggactggctggggcatggcaggcggctctggcttcccacccttctgttctgagatgggggtggtgggcagtatctcatctttgggttccacaatgctcacgtggtcaggcaggggcttcttagggccaatcttaccagttgggtcccagggcagcatgatcttcaccttgatgcccagcacaccctgtctgagcaacacgtggcgcacagcagtgtcaacgtagtagttaacagggtctccgctgtggatcatcaggccatccacaaacttcatggatttagccctctgtcctcggagtttcccagacaccacaacctcgcagcctttggccccactctccatgatgaaccgcagcacaccatagcaggccctccgcacagcaagccctcctaggagtttgtaacgcagagactctgcctgggcaatggcacacagacctctagtgg

SEQ ID NO: 1844 - DNA, 321 bp, Homo sapiens
ggaactttttagtgtaaccagcatttattggagaagtgaatcacaaggaaataaagatgagtaaaagcaaagatgatgctcctcacgaactggagagccagtttatcttacgtctgcctccagaatatgcctctactgtgagaagggcagtacagtctggtcatgtcaacctcaaggacagactgacaattgagttacatcctgatgggcgtcatggaatcgtcagagtggaccgtgttccattggcctcaaaattagtagacctgccctgtgttatggaaagcttgaaaaccattgataaaaaaactttttacaagacag

SEQ ID NO: 1845 - DNA, 133 bp, Homo sapiens; identical to SEQ ID NO: 1655

SEQ ID NO: 1846 - DNA, 190 bp, Homo sapiens
ctggggccgtggggtcagagccaagcttccatgatcatttgatgacttccaggcaggtgggggtcggagatctccagtaatgagtgacacgtctggggtttcccacagctctgactcaggtggtgggagagccacgtggaagggagagccaggcaataagtccgcataatgtgtgaggtggggagccagg

SEQ ID NO: 1847 - DNA, 243 bp, Homo sapiens
ccaggccatgttatgggatctcaacgaaggcaaacacctttacacgctagatggtggggacatcatcaacgccctgtgcttcagccctaaccgctactggctgtgtgctgccacaggccccagcatcaagatctgggatttagagggaaagatcattgtagatgaactgaagcaagaagttatcagtaccagcagcaaggcagaaccaccccagtgcacctccctggcctggtctgctgatgg

SEQ ID NO: 1848 - DNA, 259 bp, Homo sapiens
cctgagacactgtgcctggccttaacacaaatcttaattcattcttacaattattctgaggttacaaaaatggaaggggaagaaaaatggcaagtaggtaggctgacttcggcttcattatttggaaggacagtttgctcggttaaaacacactactgcttacaaaggccaagacaacagaaaaatacagacttacataaatagattttatatgtgacagcagtttgaatggagactttttcaatgcaatgagaaacag

SEQ ID NO: 1849 - DNA, 471 bp, Homo sapiens
cctggaggaagatgacgatgatagggtatctcccactgtactccacaaaatgtccaatagcttggagatatccttaataagcgacaatgagtttaagtgcaggcattcacagccggagtgtggttatggcttgcagcctgatcgttggacagagtacagcatacagacgatggaaccagataacctggaactaatctttgattttttcgaagaagatctcagtgagcacgtagttcagggtgatgcccttcctggacatgtgggtacagcttgtctcttatcatccaccattgctgagagtggaaagagtgctggaattcttactcttcccatcatgagcagaaattcccggaaaacaataggcaaagtgagagttgactatataattattaagccattaccaggatacagttgtgacatgaaatcttcattttccaagtattggaagccaagaataccattggatgttgg

SEQ ID NO: 1850 - DNA, 478 bp, Homo sapiens
ctgctgaccgcctggtgcttcaggagctgggtgctggggaagccacatgcactgcggcgtccagaggcagaagcacaaccaacaagaaccacgaaggaggcgcctttcctcctataatgcctgtttggtgccctctactgacaaagcttatcccctttcaaaaaacagccaactgaaaaagctgaatttggaacataaagtcaataaatccataaccagcaatactatggggcctggggtgcgctggcctttagtgagtggagtggggcgaaggatgctgcatgtcctgcagtgggcacagcggccctgcacgggggagaaccatccctgtaaagtgtcagtagtagcccctgtgtcagtcagggtccctgcaagaaatggcagtgcactcacataaggacagtttgagaagagtctcctgacaaggtgagtgtggctctctgcggctactaacagcctgagcctttacctccccagg

SEQ ID NO: 1851 - DNA, 307 bp, Homo sapiens
ctgacagcactcactgggcggatccaggaggccggcacggaggtggtcaaggctaaagccggagcaggctctgccaccctctccatggcgtatgccggcgcccgctttgtcttctcccttgtggatgcaatgaatggaaaggaaggtgttgtggaatgttccttcgttaagtcacaggaaacggaatgtacctacttctccacaccgctgctgcttgggaaaaagggcatcgagaagaacctgggcatcggcaaagtctcctcttttgaggagaagatgatctcggatgccatccccgagctgaagg

SEQ ID NO: 1852 - DNA, 161 bp, Homo sapiens
ctgagctgcactgctgcccctggcctcaccggcctcaggagacggtggggccgctgcatttcggggtggtcttgggaatcccaggccctaggggtcacatttgctcaggaagtgggtatcaaattgaggtgggggtgtcagaggaggcaaaggggtcccag

SEQ ID NO: 1853 - DNA, 242 bp, Homo sapiens
ccaagggtcatgatggcaggagtaatcagaggtgttcttgtgttgtgataagggtggagaggttaaaggagccacttattagtaatgttgatagtagaatgatggctagggtgacttcacatgagattgtttgggctactgctcgcagtgcgccgatcagggcgtagcttgagtttgatgctcaccctgatcagaggattgagtaaacggctaggctagaggtggctagaataaataggagg

SEQ ID NO: 1854 - DNA, 369 bp, Homo sapiens
ctggatgaccctggcccgaaagtcacagttcagttgccttattcctagttcaggcttactatctagaacctcatgctagcttaggttgcatgtttacattgctgcagtgtctttactggaaacttagttggatcgaaatggacaccgagatggagatgcttctggctagatttcgcagaaccccaggagacctgcatttagaccactctgtccatttgtgtgcccacccccacccccagggtctaagtgtagactccaagaggagcagcccagagcttggaggagaggtgtgtctggggcaccactggtgggtggtgctgctcttctttttgttgtagttaatgcggtgtcttttaatggactctcagg

SEQ ID NO: 1855 - DNA, 142 bp, Homo sapiens
cctactcaggtaaaaaatcagtgcgagcttagcgctgtgatgagtgtgcctgcaaagatggtagagtagatgacgggttgggccaggggattaattagtacgggaagggtataaccaacattttcggggtatgggcccgata

SEQ ID NO: 1856 - DNA, 285 bp, Homo sapiens
ttttttttttttttttacatttcaaaaactaactttattgcatttaatacagatataagcacgaataagacaaattagttccattctcagacaggaagaaaaacattttgggtagggagaagttaattgctggtaaagtgtagtagtattattattctaaaagataatgagttcagaagtattaaggaaatatgtgtgtgtgtacgcataggtattcaggtaaacaccaataacaataaaactctataagcggtcacagacaacacaagtacaggaggaacattt

SEQ ID NO: 1857 - DNA, 472 bp, Homo sapiens
aaagaataaggtgaagctaggtgtagatgactcgaggggatctggcctcttatgctgatcacctcaaggtctaggaggatcttaattgtcggatttgcaaggcgcctcagcatgatatcataaggctcgtgacattctgaatcaaggcgactgactcaaacgaagaaacctgaaaggttttgaccaggttgattattaatatagtaacatttttttaattaaacaaaaattgtaaaatacacctgtacaattaacattcaagtttatagaaaaacactagtttctgccttgctaataaaagaattacttgattaactagaataccaaccattcctttattaaaataaatacctgcttcttcttcgccggctgtaacgatgacaatcataagcataatgtcccttttcgccacactcatagcatctatcatttggatcaaagggacgtcgggcaggtggtctatcaaaacgtg

SEQ ID NO: 1858 - DNA, 308 bp, Homo sapiens
ctgatgttgagattgagtatgtgactgaagaacctgaaatttacgagcccaactttatcttctttaagaggatctttgaggcttttaagctcactgatgatgtgaagaaggagaaagagaaggagccagagaaacttgacaaactggagaactctgcagcccccaagaagaagggatttgaagaggagcacaaggacagtgatgatgacagcagtgatgacgagcaggaaaagaagccagaagcccccaagctgtccaagaagaagttgcgccgaatgaaccgcttcactgtggctgaactcaagcag

SEQ ID NO: 1859 - DNA, 228 bp, Homo sapiens
ctgatgctcaataaaactcagccaggagcatatggagatgctgacagccaggtaatgggtgagactgtggggtcccttttcctctaaagcctttactctgaggataaggtcacaaagtagggtgtgacttgaaagtatcgtgaccatgtagcccaccagcagcctttccaaaggggaactccagagacatttcataatgcaaacagcactgttgctttaagaacaagg

SEQ ID NO: 1860 - DNA, 105 bp, Homo sapiens
ccaccaatgacagggacgttgactcgagctggatccaaacccttcagctctgcaacaaaggtgttggctctgacgatgtccagggtcgtcacgccgaagattttg

SEQ ID NO: 1861 - DNA, 575 bp, Homo sapiens
ccacgcagtatggctgggtgctggatgctgaggtgctgctggacagtgacggcgagtttctgcccgtaagggactttgtggcacctcaccttgcccagccaactgggagccagtcaccacctccagggtctaagaggctagcgttcttgcggtgggagttccccaacttcaacagccgaagcaaggacttgctgggtcgctttgttctggcccggcgacacatagtggctgcaggcttcctgatagtggacgtcccattctatgagtggctggaactcaagtctgaatggcagaaaggcgcctacctcaaggacaagatgcgcaaagcggtggctgaggagctggacctgcccgggcggccgctcgggcaggtaaatcaaatggctctgtcccatgaagaaggtgaattggctaacaaattaataactgtttacttttgcttttttcggacttgtgtcaaaaaaaaagatgttgaatcaaaaatgcttagcgcccttttaacaggtgtgaatagggcatacccttattcccagactggtgatgacaaagtaagggagcagattgacacactgttt

SEQ ID NO: 1862 - DNA, 211 bp, Homo sapiens
aaagtaggcagtagaagggggttggtggggggtggaattggttagtaagtctggttctaatcttctgagctgcctttggaaggaagttatgaggtagaagattctactgacttttagtaaggtggacaatgagagaaaagaaaaagcaggtgcctcatctacagatccttctgggatttatttgccatgtacaatttaatgcataaaaagg

SEQ ID NO: 1863 - DNA, 193 bp, Homo sapiens
cctgggccacacccacattgaggtgatccaccaaagcttctgtcaggcaggtcgctgcagtgatagcctctcgcctcctcttttcctgcagctccttgcgttcattctgcttggcctggtgttcttttaggaggcgggacagcatggtcacgtcgggctgggggctgggtacgccgggccccctccggctccg

SEQ ID NO: 1864 - DNA, 423 bp, Homo sapiens
cctgcacccccatgttccgggagtactccctgcaggttctgaagaatgctcgggccatggcagatgccctgctagagcgaggctactcactggtatcaggtggtactgacaaccacctggtgctggtggacctgcggcccaagggcctggatggagctcgggctgagcgggtgctagagcttgtatccatcactgccaacaagaacacctgtcctggagaccgaagtgccatcacaccgggcggcctgcggcttggggccccagccttaacttctcgacagttccgtgaggatgacttccggagagttgtggactttatagatgaaggggtcaacattggcttagaggtgaagagcaagactgccaagctccaggatttcaaatccttcctgcttaaggactcagaaacaagtcagcgtctgg

SEQ ID NO: 1865 - DNA, 105 bp, Homo sapiens
aaatgacagaagcgtatatgaattcaagaaaatttaagctgcaaaaatgtatttgctataaaatgagaagtctcactgatagaggttctttattgctcatttttt

SEQ ID NO: 1866 - DNA, 567 bp, Homo sapiens
ccagactcctcaatctgagtgagagacaagtcaaaatctggtttcagaaccggcggatgaaaatgaagaaaatgaataaggagcagggcaaagagtaaagattaaagattacccccagtcctccctagctcttccccatctcactcttagttatgtgacgactgcaaagccagtgctgtctgggatgtattcaagtgaatggggaagggagtctctcttccaagtcctttatctgcacctagaacctccctcctttcctttgcccttacctgtctctctcttctctctaggtgtcaggagaaagttttgttgatttagaagatagaaatagttggttcctaagaatgtgatgggccacaaggaaagagagaccccagtcaagctcctagtatgccctgtaatttttctgggaagtcctagcccctcacttccagcttgcctgtttcttctctacacccacccaaaagtcacccagggacactccaactctacacagctcagcagacatccacacacagtaatggggtgagctcacaaccaccattcagtcaagtgaggtgacactcc

SEQ ID NO: 1867 - DNA, 355 bp, Homo sapiens
ctgtatgaagaggagatccgggagctgcagtcccagatctcggacacatctgtggtgctgtccatggacaacagccgctccctggacatggacagcatcattgctgaggtcaaggcacagtacgaggatattgccaaccgcagccgggctgaggctgagagcatgtaccagatcaagtatgaggagctgcagagcctggctgggaagcacggggatgacctgcggcgcacaaagactgagatctctgagatgaaccggaacatcagccggctccaggctgagattgagggcctcaaaggccagagggcttccctggaggccgccattgcagatgccgagcagcgtggagagctgg

SEQ ID NO: 1868 - DNA, 476 bp, Homo sapiens
ccacttggagttcctcagtggggaaaagaaaaataagaagtcacctctagccatgtcccatgcctctggggtgaaaacctccccagaccctagacagggtgaggaggaaaccagagttggcaagaagctcaaaaaacacaagaaggaaaaaaagggggcccaggaccccacagccttctcggtccaggacccttggttctgtgaggccagggaggccagggatgttggggacacttgctcagtggggaagaaggatgaggaacaggcagccttggggcagaaacggaagcggaagagccccagagaacacaatgggaaggtgaagaagaaaaaaaaaatccaccaggagggagatgccctcccaggccactccaagccctccaggtccatggagagcagccctaggaaaggaagtaaaaagaagccagtcaaagttgaggctccggaatacatccccataagtgatgaccctaagg

SEQ ID NO: 1869 - DNA, 534 bp, Homo sapiens
aaaggcacaatagggcctttggattcttttttcaacagtggttgagttgcagtcttgccatcctcttcctcaactttgtgtgtaattggtttttcactgagtggtttggaagtatctaaatcggactttttactatattccacacttactaccacatccttggtgccgggagatttctcttgtgatgacaataattcttcttgtccttgaagatgagatatatccagaccttcttttaggcgaataaccactactccatattgtatgtcaaaagcatcatgaaataagtttatatacatatccacatccctcatatctgcttgcaaccaatctttcttaaatccaaggacaagtgtgtttggcttcatacgaccaagaccagcagcctgcatcaaatactgtgcaccttctctcaagtcatctgcatgtactggagcataaaatvycttcattttgttcttaataagccatcgctgatatttggcttgatcgatggacatctctttcatggcttgtcttcgaggacccatatgt

SEQ ID NO: 1870 - DNA, 221 bp, Homo sapiens
cggagcacggagatctcgccggctttacgttcacctcggtgtctgcagcaccctccgcttcctctcctaggcgacgagacccagtggctagaagttcaccatgtctattctcaagatccatgccagggagatctttgactctcgcgggaatcccactgttgaggttgatctcttcacctcaaaaggtctcttcagagctgctgtgcccagtggtgcttcaa

SEQ ID NO: 1871 - DNA, 215 bp, Homo sapiens
ccaaggtagtggtacagcagtttacaacaacaacatgtacgtcaacatgtacaacaccgggaatattgccagagttaacctgaccaccaacacgattgccgtgactcaaactctccctaatgctgcctataataaccgcttttcatatgctaatgttgcttggcaagatattgactttgctgtggatgagaatggattgtgggttatttattcaa

SEQ ID NO: 1872 - DNA, 241 bp, Homo sapiens
aaaggcagacactgagtcagtattaatagattaactaaactgcactgtaatttagataaaattactgtgtctcactgtgtattacatgcaaaatccacataaattgtcatttaaccaacagtactgcacgagcgaacatctcgatatatgaaaactgcatcatcaattcaacgttttggtacttgaaactgcatcataaatgcaacattgtcatatgtgaaaacgacaccctaagtccttc

SEQ ID NO: 1873 - DNA, 250 bp, Homo sapiens
ccaaagtggagaatgcttgttatgccttgaaagtcagagggtcagaaattccaaaacatatgttggcagatgtgttttcagttaaaacagaaatgatagatcaagaagagggcatttcttagaatctaacgttactcagttactaattcttttgagaactcctaagagaccaatttgtaagacttatttagtatttcatttaactttattgtggcttttacatagaaacatattcagttgtacttgtttt

SEQ ID NO: 1874 - DNA, 179 bp, Homo sapiens
ctgcagaatcctgccccttccaccccaaggggcacagcccggagatgaagcttattttaggatcacaagtgcacgctctggtagacggaggatgactttgtcagtcttctggctgaagggccttgtccaaagtcaggatcagaaataggtcagctcatcatgcttggctttgttggtct

SEQ ID NO: 1875 - DNA, 194 bp, Homo sapiens
cctggtcaacctcccaaagtcaagagtgagttcaattcctacagcctgacagggtatgtgtgaagaaccaggggccagagctggggggtggctgggtctgtgaaaaacagtggacagcaccccgagggccacaggtgagggacactaccactggatcgtgtcagaaggtgctgctgaggatagactgactttgg

SEQ ID NO: 1876 - DNA, 226 bp, Homo sapiens
ccattcttttatcttgggtccatgtgagtgacagaaatggtgcggcctgggaaagatctccctcctttacattttctcttctccctcctcctccttattctaaaactgtgcctccaacagaggggcaggggctcttgtagagagatccctggcccaggacaggagatgccaaatctaatttatctcactgagggcctttgagaaaaacgcttctgggccaggctca

SEQ ID NO: 1877 - DNA, 360 bp, Homo sapiens
gaacatactaaatgattctatttttttatttatgatttcatgactaccattaagaaaatataacctgttgggaaactgtttctgccttgatgatgttgtacagacaagagataaacagtgaggaatatgcctagatgtattgggaaagacacgggtctgtggcattgwcacaagggtacacgaatactgagagtgaatgctgaaggaatgatccccattggtggtgaccctcaggtgagactagggtgcctgtgtttcagcaaagcctgggcaattggaatgcagggctcctaagattccatgacacccctaccttctaattctgttattgcaactgcagacggttacctggcacgctgg

SEQ ID NO: 1878 - DNA, 255 bp, Homo sapiens
cctaagattttgagttaacatctcttgaagccaaactccaccttctgtgctttttgcttgggataatggagtttttctttagaaacagtgccaagaatgacaagatattaaaaaaaaaaaagaaagaaaaaaaaaaaaacacctacttttacctgcccgggcggccgcccgggcaggtttttttttttttttttttttttttttttttgaaggcttwaaaaatttattccagggccctmwtagtaaaaataaaaa

SEQ ID NO: 1879 - DNA, 324 bp, Homo sapiens
cctttggcagggctcatggatcagagctgagactggagggagaggcatttcgggtagcctaggagggcgactggcggcagcagaaccgaggaaggcaaggttgtttcccccacgctgtgtcctgtgttcaggtgcgacacacaatcctcatgggaacaggatcacccatgcgctgcccttgatgatcaaggttggggcttaagtggataagggaggcaagttctggttccttgccttttcagagcatgaggtcaggctctgtatccctccttttcctagctgatattctaactagaagcatttgtcaattcttttgcctcccaa

SEQ ID NO: 1880 - DNA, 469 bp, Homo sapiens
ccaagctgcaggggatttgggggatgtgggacctccaattcccagccccggcttcagctctttcccaggcgttgactccagctccagcttcagctccagctccaggtcgggctccagctccagccgcagcttaggcagcggaggttctgtgtcccagttgttttccaatttcaccggctccgtggatgaccgtgggacctgccagtgctctgtttccctgccagacaccacctttcccgtggacagagtggaacgcttggaattcacagctcatgttctttctcagaagtttgagaaagaactttccaaagtgagggaatatgtccaattaattagtgtgtatgaaaagaaactgttaaacctaactgtccgaattgacatcatggagaaggataccatttcttacactgaactggacttcgagctgatcaaggtagaagtgaaggagatggaaaaactggtcatacag

SEQ ID NO: 1881 - DNA, 174 bp, Homo sapiens
agaacctgggcttcagaatggggagctgggaaagcaggaagccagcagacacccgcagggacgggaactcctctagcacctccaggaatgtggggctgttggtgaacttccacttgctgtactctgagggctggcacagggcctccagcctctgtctctcaggctcttctgtgg

SEQ ID NO: 1882 - DNA, 413 bp, Homo sapiens
cctcccaggtcatcgtcctctgccccgaagcccgagaagctgatgggctggcaggccaggctgcgcaggttcacaaggcaggcggtctgcgtggcactgaagtcagggacagtcaccaacagcactgtctggtcctcaggacctcggatgattttggagccaaagctgggggtgttgccacaaaagtagacatgcgggcactctgggaagatgaacgggtcagttttgtagaaggggtaacaacctagagtgtcaggggctgtggggctgatgtgacggacccgcagggtccactccaggatctccaagtgatcctccatgctgctgtatcggaaaatgtcactcacgttctgtcctgatgtccccaaaaatctgactccatcaatggtggcctggtaggggttggtgaccag

SEQ ID NO: 1883 - DNA, 193 bp, Homo sapiens
gcctggttggccctgggctttagtctggcagbgtatggggccagctaccactctatgagctcgatggcacgagcagccgttctctgakgatggggccctgatggatggtggcatggacctcaacatggagcagggcatggcgasarcaccttaaggatgtgatsctactgacagccatcgtgcargtgctcag

SEQ ID NO: 1884 - DNA, 213 bp, Homo sapiens
cctgggtgttccccaccttgggcatcatgcaccacaacaaacaggccactgagaatgcaaaggaggaagtgaggcgaattctggggctgctggatgcttacttgaagacgaggacttttctggtgggcgaacgagtgacattggctgacatcacagttgtctgcaccctgttgtggctctataagcaggttctagagccttctttccgccagg

SEQ ID NO: 1885 - DNA, 78 bp, Homo sapiens
ctggccacagtggcttgcacctataatcccagcactttgggaggctgaggtgggcagatcacttgaggttaggagttc

SEQ ID NO: 1886 - DNA, 206 bp, Homo sapiens
ctggkgctattcacaggctgaagaactgggcakttcttacttgggtctgtcctaggatgtggaggaagttcargactaacgctaggcagagagtatgactmggtttacccagcctaggggcctctggatgggaacactccattccaagatctcascwkagcagggcttcctggcttgaggctggaagcctttgggaagaggcccak

SEQ ID NO: 1887 - DNA, 133 bp, Homo sapiens
ctggagaggttagcctgtccaccttcccacccatgtgtggtagggaagaaggtgaccatctagttaaagaaaaaaagatccttccaaagctgtatttggcataagctaataccactgctagtgctgccactgg

SEQ ID NO: 1888 - DNA, 233 bp, Homo sapiens
ccttgctctgagaagaaccacgctgtcgggcatgaaggctccaacagtgacatcaggatagccatttccgtccatatcaatgcctcccgatatggactgaccaaacatccggagcactggatttatcttctgcccagacagtttcattgagtactgagggactatcccaccggcatcaccatgatagatatagaccgcccctgcgaagtcatcctccttgggtgcaccaatgg

SEQ ID NO: 1889 - DNA, 381 bp, Homo sapiens
ctgagtctgccaggacacggggctctgggaagctctgaacccctcccatgccccagatcctgtgccacccacacccacaccactcaggactctggaaggaggtgagcggggaccataccaagaccccagaggtgcctgtggagagcagggcttgctggggggaagacaatgaagcagccaaggatccctctcgaggggctctgtctctggctgtgcttctccagcccaagctgcccctctccccgggggcagtgacaactgttcccccagagcaagtccagagtcacagaccgtatcccctcccaccagcaaacaggaaactaaagcagtgaaaacatcaagctttgttgccagagaaaaaaaaatgaaccctaagtattt

SEQ ID NO: 1890 - DNA, 342 bp, Homo sapiens
ctgctgatacccaggcagtagctgatgctgtcacctaccagctcggtttccacagcattgaactgaatgagcctccactggtccacacagcagccagcctctttaaggagatgtgttaccgataccgggaagacctgatggcgggaatcatcatcgcaggctgggaccctcaagaaggagggcaggtgtactcagtgcctatggggggtatgatggtaaggcagtcctttgccattggaggctccgggagctcctacatctatggctatgttgatgctacctaccgggaaggcatgaccaaggaagagtgtctgcaattcactgccaatgctctcgctttgg

SEQ ID NO: 1891 - DNA, 242 bp, Homo sapiens
aaaaatattagggcattacacctttttcagaacaaggataatttacagaaattatacaaagcagattttcatcaaatatcaattatttagcgatgttttatttagctgaaatgttatttcacttgtaaaaactatctccggttacaaaaaaaaatcagaaaccttattaaatttaacctgcttttacaaatgtcctaagaagtcttaagctaaacaaaatttaagtaggaaaacgataattt

SEQ ID NO: 1892 - DNA, 350 bp, Homo sapiens
cctgatgctctcagaggcaatagaagaaaagtaaaaggaaggtctcacttcacagacaatgaaaccctcctaaccctcttccccactacccacaactccctacactgccaatctaaataaaaagaggacaatgcatgagtgtgagatacacatacacacacacatacacacacacacacgcacagcttcctttcagccaaagaactgcaaaatccttccccggaaggaggacaactggcaacaccaatcaaggcttggtggtctaaggtgatggctggaatcatgtgagactggtaaaaatccagggagaaaatgtttcaccttcagctcattcccaagtctctatgaag

SEQ ID NO: 1893 - DNA, 387 bp, Homo sapiens
ggaggcgccatcgtgggagtggacatccgccataacaaggaccgaaaggttcggcgcaaggagcccaagagccaggatatctacctgaggctgttggtcaagttatacaggtttctggccagaagaaccaactccacattcaaccaggttgtgttgaagaggttgtttatgagtcgcaccaaccggccgcctctgtccctttcccggatgatccggaagatgaagcttcctggccgggaaaacaagacggccgtggttgtggggaccataactgatgatgtgcgggttcaggaggtacccaaactgaaggtatgtgcactgcgcgtgaccagccgggcccgcagccgcatcctcagggcagggggcaagatcctcactttcgaccag

SEQ ID NO: 1894 - DNA, 255 bp, Homo sapiens
ctgaagtggtatgaggctagctctttccaaaagcattcaagtttggcttctgatgtgactcagaatttaggaaccagatgctagatcaaataagctctgaaaatctgaggaacattgtaggaaaggtttgttaagcatctcttaagtgccatgatgagcataacagccggccgtggtggctcgcgcctgtaatcccagcactttgggaggccgaggtgggaggatgacaaggtcgggagttcgggaccagcctgg

SEQ ID NO: 1895 - DNA, 363 bp, Homo sapiens
ctggacaagaagattatgacagattacgccccctatcctatccgcaaacagatgtgttcttaatttgcttttcccttgtgagtcctgcatcatttgaaaatgtccgtgcaaagtggtatcctgaggtgcggcaccactgtcccaacactcccatcatcctagtgggaactaaacttgatcttagggatgataaagacacgatcgagaaactgaaggagaagaagctgactcccatcacctatccgcagggtctagccatggctaaggagattggtgctgtaaaatacctggagtgctcggcgctcacacagcgaggaaaatcactaacctatgataaccacacctcaatttgaaagtagattt

SEQ ID NO: 1896 - DNA, 287 bp, Homo sapiens
aaattcaagtgaagccattaattttcttaccagtctggactgttctgacatgtcacttcacagttttgagactaacaaacacccttaggtctaccccaaaccaaaaaaagccagggagggacagtttagacaacttttaagttaagactagaatgcccccttaagtagataggcaccaccgttatacgcctttagcacaaggcttagaaaggcaaaacatttctaaagacataaaaccgccaaattgtcatttacactaagctgtggtattttttgttttgattttt

SEQ ID NO: 1897 - DNA, 256 bp, Homo sapiens
caactattggatgattatccgaaatgtttcattgtgggagcagacaatgtgggctccaagcagatgcagcagatccgcatgtcccttcgcgggaaggctgtggtgctgatgggcaagaacaccatgatgcgcaaggccatccgagggcacctggaaaacaacccagctctggagaaactgctgcctcatatccgggggaatgtgggctttgtgttcaccaaggaggacctcactgagatcagggacatgttgctgg

SEQ ID NO: 1898 - DNA, 275 bp, Homo sapiens
ccaattgatttgatggtaagggagggatcgttgacctcgtctgttatgtaaaggatgcgtagggatgggagggcgatgaggactaggatgatggcgggcaggatagttcagacggtttctatttcctgagcgtctgagatgttagtattagttagttttgttgtgagtgttaggaaaagggcatacaggactaggaagcagataaggaaaatgattatgagggcgtgatcatgaaaggtgataagctcttctatgataggggaagtagcgtcttg

SEQ ID NO: 1899 - DNA, 189 bp, Homo sapiens
ctgaaccctaaagacactgtcatgaactgtgttgaatggtggaaatcagtatttctgtttgtggtgttgttatttgttacatctgtttcatgtctaggtgttgtgggtgtggctgttgaaggaagtttgcagtcttgcagcttttattccctgtgcaacaaaagattagaacatgttaaagggattttt

SEQ ID NO: 1900 - DNA, 305 bp, Homo sapiens
aaagtcaagcactagagatagtggattaatactcttttgccgtacactatatacagatgtatagtacaagtaacaatggcaaacagaatgtacagattaacttaacacaaaaacccgaacttcaaaatgaaggtgtgtggaggaaaggtgctgctgggtctccctacaactgttcatttctttgtggggcagggggtagttcctgaatggctgtggtccaatgactaatgtaaaacaaaaacagaaacaaaaaaaacaaggaactgtcatttccacgaaagcacagcggcagtgattctagcagg

SEQ ID NO: 1901 - DNA, 258 bp, Homo sapiens
aaatttcaccagttaaattaggtcaaatggaaggaactcaaatgagtattgcccaatcagagcccattatttgtaagtcatcagtaaccttaaaactccacttagacctaattattgaaaacttgcatataatgaagtgaaagaatttccattcatcaacctctcaatcccaggttttcaaagaaaaacctatctaaggaatacttaccaaaatctgataactatgcaggtttgttccactacaaccagtctgcatac

SEQ ID NO: 1902 - DNA, 213 bp, Homo sapiens
cctgaacatctcacacagcctgttcacacagctcctcgagttcctcctctgagcctgtatttagagagcggggaggaaagaggtcattgagggtcaggccagggacctgcttctctcgcctgcagcagagtgtggctgagaggggaccacagggagggagaagcagagactgtctggaaagggtggttagattgaaagctaagggggccccag

SEQ ID NO: 1903 - DNA, 102 bp, Homo sapiens
agtttttttttttttttttttttttttttttttattaaagtgtgttaattaattaatgcttgtaggacataataataacaattgaatgtytgcacagccgyt

SEQ ID NO: 1904 - DNA, 229 bp, Homo sapiens
aaattttcttatctgattttggtaagtattccttagataggtttttctttgaaaacctgggattgagaggttgatgaatggaaattctttcacttcattatatgcaagttttcaataattaggtctaagtggagttttaaggttactgatgacttacaaataatgggctctgattgggcaatactcatttgagttccttccatttgacctaatttaactggtgaaattt

SEQ ID NO: 1905 - DNA, 407 bp, Homo sapiens
caaaattgggctttttggtggtgctggagttggcaagactgtactgatcatggagttaatcaacaatgtcgccaaagcccatggtggttactctgtgtttgctggtgttggtgagaggacccgtgaaggcaatgatttataccatgaaatgattgaatctggtgttatcaacttaaaagatgccacctctaaggtagcgctggtatatggtcaaatgaatgaaccacctggtgctcgtgcccgggtagctctgactgggctgactgtggctgaatacttcagagaccaagaaggtcaagatgtactgctatttattgataacatctttcgcttcacccaggctggttcagaggtgtctgcattattgggccgaatcccttctgctgtgggctatcagcctaccctgg

SEQ ID NO: 1906 - DNA, 264 bp, Homo sapiens
aaacaagtcaatttagaaataccatagaattaaacaaaacttctgacatgtaaacatactgccatgttcctgaaacagatgttaacacctgataaaagttaataatctcttgttaggaaagctgtccattaataaggccagtcttcagcaaaactaaaaccattttgttcgtttagctttcctagtctgacaacgcaatactgttgaaccacagtcaaatataatgacaacattggatggatagatcagtaccattggttacag

SEQ ID NO: 1907 - DNA, 118 bp, Homo sapiens
ggaccgcatcctagccgccgactcacacaaggcaggtgggtgaggaaatccagagttgccatggagaaaattccagtgtcagcattcttgctccttgtggccctctcctacactctgg

SEQ ID NO: 1908 - DNA, 354 bp, Homo sapiens
ctggttaggtagagggagttgtcaagtctctgctggcccagccaaaccctgtctgacaacctcttggtgaaccttagtacctaaaaggaaatctcaccccatcccacaccctggaggatttcatctcttgtatatgatgatctggatccaccaagacttgttttatgctcagggtcaatttcttttttctttttttttttttttttctttttctttgagactgggtctcgctttgttgcccaggctggagtggagtggcgtgatcttggcttactgcagcctttgcctccccggctcgagcagtcctgcctcagcctccggagtagctgggaccacaggttcatgccaccatgg

SEQ ID NO: 1909 - DNA, 325 bp, Homo sapiens
ttgaattgaccggttgttgttccatcaccccgcagccaagaacttccagccattctccatgaaagttgatctccatctcaaaggaaggatgtgtaaaagggaagtagcagtctacccatcttatctccagctcatctccaaaaagatgtgccatgagcctggtaagcgtttgcttaagatcaaactctacaagcttcacggcctccatggtgtgtgtctcttgtttatgcgcagagcgagaactttgttcaaagagctgcaggctttctccatcctttataccagcaaataactcatgcttggagaagagccgcacggcctccag

SEQ ID NO: 1910 - DNA, 210 bp, Homo sapiens
cctccacggcacccacggcggtggcttctgtggggtcgctggtaatgggcgccaggcggcggagttcctcaaataattgcaagtggtagatggcagcctctgcctcacgggcaatcaggtgctgcatgcgcacagcctccagaggatagtcccctttggctgtttctccagacagcatgatgcagtcggctccatccaggactgcattgg

SEQ ID NO: 1911 - DNA, 242 bp, Homo sapiens
cctcctatttattctagccacctctagcctagccgtttactcaatcctctgatcagggtgagcatcaaactcaaactacgccctgatcggcgcactgcgagcagtagcccaaacaatctcatatgaagtcaccctagccatcattctactatcaacattactaataagtggctcctttaacctctccacccttatcacaacacaagaacacctctgattactcctgccatcatgacccttgg

SEQ ID NO: 1912 - DNA, 139 bp, Homo sapiens
ctggaacctttaggctaggaaaagggagaaggaccctacccccactgtgcccgacctgagacaaatccacagaaaagcaatccttgctaactctgggcagtatgtggacaagatactaatttttaatctctgcatctcc

SEQ ID NO: 1913 - DNA, 191 bp, Homo sapiens
aaatgcttgttctaagacatttctgaatgtagaccattttccaaaaaggaaactttattttcaaaaacctaatccgtagtaattcctaatcttggagaataaaaaagggcggtggaggggaaaacattaagaatttattcattatttctcgagtactttcagaaagtctgacactttcattgttgtgccag

SEQ ID NO: 1914 - DNA, 157 bp, Homo sapiens
ctgcccagaagccccggaacacacaggaagacaacactataggatggcaggtggggatctgtgcaatacaaacatgtagctagaaaacccaaccgaggatctgtctagaatacttccgatatcaatataccgtagttgaaaccagaaccgtctccag

SEQ ID NO: 1915 - DNA, 170 bp, Homo sapiens
ctgatggacggagagggtggcattgtagggctcgaccacggtgtcagacactttgggtgaaggcaccacactgaaggtattcatgatgcgatcagggtattcttctcggatcttgctgataaggagagtgcccattccagagcctgtgcccccgcccagtgagtgggtca

SEQ ID NO: 1916 - DNA, 407 bp, Homo sapiens; identical to SEQ ID NO: 1905

SEQ ID NO: 1917 - DNA, 202 bp, Homo sapiens
ccagcatgggcggatgccgggcatgagctgctgtaaactatttgtggctgtgctgcttgagtgacgtctctgtcgtgtgggtgccaagtgcttgtgtagaaactgtgttctgagcccccttttctggacaccaactgtgtcctgtgaatgtatcgctactgtgagctgttcccgcctagccagggccatgtcttaggtgcag

SEQ ID NO: 1918 - DNA, 178 bp, Homo sapiens
ccaggctggtctcgaactccctacctcaggtgatccacccaccttggccccacagagacaattacatcttcaaaatttcacttatttcaacacggtatcaagtgatgatgtgagttacaagaagtctggaggaaaaagctgagagaggaaaactgccctgggtaagaaaggaaaccaa

SEQ ID NO: 1919 - DNA, 263 bp, Homo sapiens
cctgcagtgcccattatgactgcggctgctaccacagtgatgatgacaatctcataccggggggagagcacattcacggtcaccttgcgggtgacctccccttgagtgctcctggcccgacagaggtaggtgccctcaagatctcgagtgacagtcactgattccccgatgggcagtgggaaagtgccatcctttagacacttgagctcgggcaatgggttcccccaagcctggcacattggagtctgctgggaattttctgg

SEQ ID NO: 1920 - DNA, 129 bp, Homo sapiens
tgctcagtgatgccggagacggaggaggtggtgtgcaataactgccctcccggggtcaccggtgcccgctgtgagctctgtgctgatggctactttggggacccctttggtgaacatggcccagtgagg

SEQ ID NO: 1921 - DNA, 268 bp, Homo sapiens
ccaccccggagatgacacgaggctcacatgactctagacacttggtggaaagtgaggcgagaaaaacaatgacttgggccaattacacgactgcaaagctagagctgccaacagggctccagggagcttggcttctgtagaagttctaaggaagcggtacgaactccacggcggtggggcgctaactagcagggacccctgcaagtgttggtcgggggcctcgagctgcctgagctgacacgaggggaggggtctgtgtagccaacag

SEQ ID NO: 1922 - DNA, 164 bp, Homo sapiens
ctgccaagggaagaaggtagggctggactccctgctgtggcccagcccttgttaggggttggtctctcactgcagccagacaggatgatcctgggtcctggggagggtaagctgccccttgccgagttctgcaccgaataaagagtccaaacccgctgcttccg

SEQ ID NO: 1923 - DNA, 163 bp, Homo sapiens
  misc_feature 9, 22: n = A,T,C or G
aaatatatngcaagagttcatngtttacattctgatttgatataacaatcaataaaatctttggagaagtttgtaagttctgggttgttgctatagatacagatagggaaaaaagtactttaactttcctcaaaaggtaacttcccttgacgagtgagttagg

SEQ ID NO: 1924 - DNA, 244 bp, Homo sapiens
gcaaaaccccactctgcatcaactgaacgcaaatcagccactttaattaagctaagcccttactagaccaatgggacttaaacccacaaacacttagttaacagctaagcaccctaatcaactggcttcaatctacttctcccgccgccgggaaaaaaggcgggagaagccccggcaggtttgaagctgcttcttcgaatttgcaattcaatatgaaaatcacctcggagctggtaaaaagagg

SEQ ID NO: 1925 - DNA, 437 bp, Homo sapiens
ctgctaggtgtaaggagaagatggttaggtctacggaggctccagggtgggagtagttccctgctaagggagggtagactgttcaacctgttcctgctccggcctccactatagcagatgcgagcaggagtaggagagagggaggtaagagtcagaagcttatgttgtttatgcggggaaacgccatatcgggggcaccgattattaggggaactagtcagttgccaaagcctccgattatgatgggtattactatgaagaagattattacaaatgcatgggctgtgacgataacgttgtagatgtggtcgttacctaraaggttgcctggctggcccagctcggctcgaataaggaggcttagagctgtgcctaggactccagctcatgcgccgaataataggtatagtgttccaatgtctttgtggtttgtagag

SEQ ID NO: 1926 - DNA, 148 bp, Homo sapiens
aaaacttcagcctcagttgtttaacagtctctttaatatattaatctgcactaacatctctgtgatatatgcacatattttagaggtaatcatgtcttctagattacttgtgtgcatttgattgggcttcttgtttagggtccctttt

SEQ ID NO: 1927 - DNA, 96 bp, Homo sapiens
gtgcgcgccaccacacttggctaatttttgtttattagtagagacggggtttcagcatgttggctaggccggtctctcctgacctcagggtgatca

SEQ ID NO: 1928 - DNA, 229 bp, Homo sapiens
ctggctgaggtggaggtgaagaagttcaagcagatgacagaggccataggccccagcaccatcagggaccttgctgtggctgggcctgagatgcaggtaaaactgctccagtccctgggcctgaaatcaaccctcatcaccgatggctccactcccatcaacctcttcaacacagcctttgggctgctggggatggggcccgagggtcagcccctgggcagaagggtgg

SEQ ID NO: 1929 - DNA, 308 bp, Homo sapiens
ctgaatggagaaatccggcagcaggttgaaaagtctgttctgagaacagattattgctgagcagagttcatgtgacttctagacgtggtgacttaaaaaatggccttaaggctgcagagccagccacctctgcttacaaaaagagtacttagtgcacatgactgtaagaaacaattgtaaaacctcatctagaaatcagaaagcttctaatttctatagaaatgacacctccctggagccgagagacaatctgttgttgattttgaagggcaggcaagaccaacactgtatttagttccatagccagg

SEQ ID NO: 1930 - DNA, 202 bp, Homo sapiens
ccgggcaggtaaaagtgatcttgagaaccttttcaaaccagatggagcattgcttgcaaattttttttctctatgtttgcatgcgctcgtgtgtgtgtgtccaggcaagaacacattttataaaaataagaacacttgggctgggcatggtggctcatgcctgtgatcgcagcactttgggaggccgaggccggcagatcac

SEQ ID NO: 1931 - DNA, 265 bp, Homo sapiens
ctgtcgaagtacatcgagcccctgcgccgcatgatcaacaagatcgacaagaacgaagacagaaaaaaggacctgagtaagatgaagagccttctggacattctgacagacccctcgaagcggtgtcccctgaagaccttgcaaaagtgtgagatcgccctggagaaacttaagaatgacatggcggtgcccactcccccaccgcccccggtgccaccgaccaaacagcagtacctatgccagccgctcctggatgccgtcctgg

SEQ ID NO: 1932 - DNA, 249 bp, Homo sapiens
ccacggcttcatttttggcttcagtttgtttactgaacagaagggagaggggccctgtgagacagaggacactgactcaggtcggtgagtggccctcactgtatagagtccatggctggggaccaagtggcactgagactcgcccaaagtcacatcacagagctggggtgccttgctgactccctggccccaatctgcttttccatttgtcgaacgcacactggcacactggctgcagcagacctcggc

SEQ ID NO: 1933 - DNA, 181 bp, Homo sapiens
ctgcacaggatggaacaggtgaaagagaggggctggcagttccaggaggctcatgggaaagtccagggcagaggggagggccctctctgtcccccttcccacgctaaccgccgctcagtacacagggggcggctggtagccctcggtggtctccgcgttctgggtgaagggtggctgttgg

SEQ ID NO: 1934 - DNA, 206 bp, Homo sapiens
cctcatcccacacttatggaaaaagatgacagtgcacagacgagatacataaagacttctggtaacgccactgttgatcacttatccaagtatctggctgtgaggttagctttagaagaacttcgaagcaaaggtgaatcaaaccagatgaaccttgatacagccagtgagaagcagtataccatttatatagcaacagccagtgg

SEQ ID NO: 1935 - DNA, 496 bp, Homo sapiens
  misc_feature 472: n = A,T,C or G
aaaatgataagtctcactcaagattttttatgtatgtataaatattttggtgtgctacaaaagcctttgcaaattatcagtagtagttttttttttttttttttttacctgcccgggcggccgcccgggcaggtaaatttgaaaagcatcatgttctcatgatttatgggaatgaagcaagtactgaaatcaaattaaatactccctgggtcctgggtcagtttgaccctagccctggggtgaggcaagccccctcctatgaggatgagcaaaaatactactctcttcgccctgagttgctttctggatctggggcttcaggacttgctgcttcagtcagcctttattagcaccaaagactttatgaagatcccacacacagacacacatcccttcccgcctcccccctgccttcagtaggawctggctccgtggctggaggaccaacccctatagtgggaatgcagagctnaacgtgtactgcttgtgtgtgtgc

SEQ ID NO: 1936 - DNA, 350 bp, Homo sapiens
gagaatacaccatcaacattcacaagcgcatccatggagtgggcttcaagaagcgtgcacctcgggcactcaaagagattcggaaatttgccatgaaggagatgggaactccagatgtgcgcattgacaccaggctcaacaaagctgtctgggccaaaggaataaggaatgtgccataccgaatccgtgtgcggctgtccagaaagcgtaatgaggatgaagattcaccaaataagctatatactttggttacctatgcacctgttaccactttcaaaaatctacagacagtcaatgtggatgagaactaatcgctgatcgtcagatcaaataaagtcaaaaaaaaaaaa

SEQ ID NO: 1937 - DNA, 270 bp, Homo sapiens
ccaattgatttgatggtaagggagggatcgttgacctcgtctgttatgtaaaggatgcgtagggatgggagggcgatgaggactaggatgatggcgggcaggatagttcagacggtttctatttcctgagcgtctgagatgttagtattagttagttttgttgtgagtgttaggaaaagggcatacaggactaggaagcagataaggaaaatgattatgagggcgtgatcatgaaaggtgataagctcttctatgataggggaagtagcg

SEQ ID NO: 1938 - DNA, 282 bp, Homo sapiens
ctggcgatgctgtcaccttcccccttgcctggaggaacaaccgcaaagtgaacattccacattggcagatggctcatgctcaggggcgcgtggcagcccagaacatgttggcgcaggaggcggagatgagcactgtgccctacctctggaccgccatgtttggcaagagcctgcgctacgcgggctacggagaaggcttcgacgacgtcatcatccagggggatctggaggagctgaagtttgtggctttttacactaagggcgacgaggtgatcgccgtgg

SEQ ID NO: 1939 - DNA, 352 bp, Homo sapiens
ctgtgcaccgacatgttctcagtgtcctgagtaagaccaaagaagctggcaagatcctctctaataatcccagcaagggactggccctgggaattgccaaagcctgggagctctacggctcacccaatgctctggtgctactgattgctcaagagaaggaaagaaacatatttgaccagcgtgccatagagaatgagctactggccaggaacatccatgtgatccgacgaacatttgaagatatctctgaaaaggggtctctggaccaagaccgaaggctgtttgtaattgggaagcacgtctactgctggagaggtcacatgctgccaagtgcccagacattgccacccag

SEQ ID NO: 1940 - DNA, 302 bp, Homo sapiens
aagacacattcaagtggggggaaaaagtaaattagaatgtagaaagcctttatcatatcatactcaaatcttttgcttagatgagcagttccttcatcacaaacgtctttgctttgccatgtgcattacaaaaataaaactaactatggcttgcttaaagtgccattttataaagttgtcttttttaattagccagaaagacccaattttatccatggcaagaagtgagcagaattggtgactgaatattgacaaatgaccaacaacaaagacaacaacaacaacaaaacatcccataattt

SEQ ID NO: 1941 - DNA, 156 bp, Homo sapiens
cctatctgcttgtacaaggacttcctcttttgagcattctcagtcttgaaagggcagttgatggtcaccgttctgcccaggtccactgtgtagactttagtgtcatttaggagcccaggaccctggctgacctccaggctgacatcaaaggacagg

SEQ ID NO: 1942 - DNA, 552 bp, Homo sapiens
aaataaacgttagcccattacacatcctgtcatatggcatgtaggcagtgtggtatggatgaaagagatgtggagagaggcagacatagactgaaatcccagctttgtctgttactagatgtggaccttgggcatattacttagcttctcttagcttcagtttcctcatctgtaaaatgggaatattaattacaatgctcatatggttgctctgaggtttaagagaaatagcatatgtatacttcagcattcagtatgtgccttcttgtaacttcctacactggtaacagtgggtttttttttttgccaattatgcatttagaaagttttaagaatttacaattaaatcatttttgtctaaacgtaattcaaatcaagttctttcagtgacctaattctggtatacagttaggattttgttaagggaactaatattagactttacctattatgatgcttttaaggttacattaccatccagtgaaataaattttaatatttttagttgaatgatcttttattcaaaaggaccccacttttctacatataaaa

SEQ ID NO: 1943 - DNA, 488 bp, Homo sapiens
cggccgaggtctgacctggcctcttgcctaaaccacaaggctaagggctatagacaatggtttccttaggaacagtaaaccagtttttctagggatggcccttggctgggggatgacagtgtgggagctgtggggtactgaggaagacaccattccttgacggtgtctaagaagccaggtggatgtgtgtggtggctccagtgggtgtttctactctgccagtgagaggcagccccctagaaactcttcaggcgtaatggaaaatcagctcaaatgagatcaggcccccccagggtccacccacagagcactacagagcctctgaaagaccatagcaccaagcgagccccttcagattcccccactgtccatcggaagatgctccagagtggctagagggcatctaagggctccagcatggcatatccatgcccacggtgctgtgtccatgatctgagtgatagctgcactgctgcccgggattgcag

SEQ ID NO: 1944 - DNA, 239 bp, Homo sapiens
cctgctgggaacgggacttctaaaaggaactatgtctggaaggctgtggtccaaggccatttttgctggctataagcggggtctccggaaccaacgggagcacacagctcttcttaaaattgaaggtgtttacgcccgagatgaaacagaattctatttgggcaagagatgcgcttatgtatataaagcaaagaatctttgttccatggtcacctcagtgagaccttccttggctattt

SEQ ID NO: 1945 - DNA, 57 bp, Homo sapiens
ccatggctaggtttatagatagttgggtggttggtgtaaatgagtgaggcaggagtc

SEQ ID NO: 1946 - DNA, 378 bp, Homo sapiens
ccaagaaagggacatctatgtgaaagtgaaactgagacagtgctggtcacaggtcatgctgcagaataatacattcccaggcactgtcacgtgggggacccaagaggccccaggagtgacctataacctctccagaaagaccactctgtgtggcatcacagtccacacagtttaaggaaatatttagacttaacaatcagacaccagctcttactcacacttacactcacagcccacacacaagtgtgcaaacatacacacacatatatatttcctgatacattcatggaatatcagagccctgccctgaagtcgttagtgtctctgctccccaaaccgctgctcccacattggctaagctccctcaagagacctcag

SEQ ID NO: 1947 - DNA, 313 bp, Homo sapiens
aaactttataagtatgattataatagtggagaagaattagaatcctacaagggacactttggtcctattcactgtgtgagatttagtcctgatggagaactctatgccagtggttcagaagatggaacattgagactatggcaaactgtggtaggaaaaacgtatggcctttggaaatgtgtgcttcctgaagaagatagtggtgagctggcaaagccaaagattggttttccagagacaacagaagaggagctagaagaaattgcttcagagaattcagattgcatctttccttcagctcctgatgttaagg

SEQ ID NO: 1948 - DNA, 250 bp, Homo sapiens
ctgagaacgcagtggtgggggaaaaccctgatgcccaggatgaccaggcagaagatgaggaggaggacaatgaggaggaagatgacgctggtgtggaggatgcggcagatgctaataacggagcccaggatgacatgaattggaatgctttagaatgggaccgagctgctgaagagcttacatgggaaagaatgctaggacttgatggatcactagtttttctggaacatgtcttctgggtggtatcttt

SEQ ID NO: 1949 - DNA, 265 bp, Homo sapiens
aaaaatcctgtagaaggatcaggtaacaggaaaatggccggtgaattctgtaaaaggaagtgagtagaactgttttgggttagaaaagaagcactttaggcagccaccatgggaagaaggcgggtcaccttctcactgaagataagagaccaagtgccgatggacagcaacaggcagtgtctgaaaactagtccgataccatcatggtctttgagggaaaatctgattccactggggtttccatgtcaatagtggactcaaattt

SEQ ID NO: 1950 - DNA, 271 bp, Homo sapiens
aaacctgaaaagtaggaagcagaagaaaaaagacaagctaggaaacaaaaagctaagggcaaaatgaagtgaaaggtaaagaatcgtgtgagggtgggactgtctactgagtagcctcctcagattcattgaactaggtctgtcccaatgtatgggatggcggatagtaagtttgtaattactgtggcccctcagaatgatatttggcctcacgagaggacatagcctatgaaggctgttgctatagttgcaagcaggaggataatgccga

SEQ ID NO: 1951 - DNA, 359 bp, Homo sapiens
ctgtgcatccaatttattatagttttgtaagtaacaatatgtaatcaaacttctaggtgacttgagagtggaacctcctatatcattatttagcaccgtttgtgacagtaaccatttcagtgtattgtttattataccacttatatcaacttatttttcaccaggctaaaattttaatttctacaaaataacattctgaatcaagcacactgtatgttcagtaggttgaactatgaacactgtcatcaatgttcagttcaaaagcctgaaagtttagatctagaagctggtaaaaatgacaatatcaatcacattaggggaaccattgttgtcttcacttaatccatttagcactattt

SEQ ID NO: 1952 - DNA, 441 bp, Homo sapiens
cctttccaaacccctccttttattcctgtttcccgaaataaggtatttgtagagttaaggacctactgcatgcctgtccccagggccccggtggaaggaaggcagcgcctgctcttccttgactcagcccatcatctgaaaattcagaagtgaaccaagggttagacgccagaggttgggcttctgttagagtggcttcaaaacatgagccttatgggaagtagccttaaaaaaagaatgggtatacgcagtgacttccgatggaaatctccaaaacaatattcctaagtagcaatggggttggctcaagtctttattaacaaagaacattctctttcatctataaagaaattcttaaagatgcattgacagtgttgaattaccaacagcctgtgaagatcagtttgaccggtgtggacacgtgctggttaagcactcagg

SEQ ID NO: 1953 - DNA, 104 bp, Homo sapiens
ctggtatttgtatctaaaactcagattggtcacataaatgccacggcattccgaagttttgattttgattaacattgacaggattactgtgtgtttaatttttt

SEQ ID NO: 1954 - DNA, 244 bp, Homo sapiens; identical to SEQ ID NO: 1720

SEQ ID NO: 1955 - DNA, 439 bp, Homo sapiens
ccagtctcgagccattcctgctgcagtcagcaacggggacacaggcttatcaaacagaaagtggtcatcaataagctgctgctgttcagcctctgtcatctcactgagcctatagtaacgtccagccaggtcacccttcaggccactcagtgcatccaccacaacacgttccacctctcgtcgctctgctcgagtgcaagctggaggcagactgagtcctcggatgcttcggccagttctgactctagaggacaatacatacctctcatcaaagtagccagaacggattttactggcatctagatccgtggtgtgcttcattgtccgggggtcatatccattgtgtcgctcttggatcacagggtcaaacaggtcagcaaatacctcataggtctcctcatctccagccaccatgcccacagtcttgatgaaggggtgg

SEQ ID NO: 1956 - DNA, 192 bp, Homo sapiens
cctcagaaattcagcgggtgcctgggaggcttcattcacattcacctctaaggagaggctaaaagaggaatttccagatggcagctactggctcagaaccagggggtcccttgccaagtctgtctctatgtggctcccggaattgctgaggtctcacttctcagagggctttgatggaaaataaaacaacag

SEQ ID NO: 1957 - DNA, 343 bp, Homo sapiens
ctgttgtggggacttccggcgaaagcacccctggaaccttgttgcactgtcggtcctgaccgccagcctgtcgtacatggtggggatgatcgccagcttctacaacaccgaggcagtcatcatggccgtgggcatcaccacagccgtctgcttcaccgtcgtcatcttctccatgcagacccgctacgacttcacctcatgcatgggcgtgctcctggtgagcatggtggtgctcttcatcttcgccattctctgcatcttcatccggaaccgcatcctggagatcgtgtacgcctcactgggcgctctgctcttcacctgcttcctcgcagtggacacccag

SEQ ID NO: 1958 - DNA, 275 bp, Homo sapiens
ccagtcacaaacaccagctctagtaagagggcctggttaaagatatcataaacagctttctccatgtccctggtccctggagtcagtgatgtcggcatttgggactgcgacctggctggagcttggatttgcccacatcaatcaatgcttctccctggcttcagagaaaactttcccataataagcagtcaacgtgttagcgatggagccaggaataagctccttggggcctgggagtcattagatgaaatattcctctttctcgctgcccttgg

SEQ ID NO: 1959 - DNA, 242 bp, Homo sapiens
aaaagaatggaaattgcagttctacagtagtactttatatagtcctacagtccaggaggtcaggatgtcagacgcagcccctggcagcggctgctgcttggcagtcgatcggaatcgtgggatcttccggcccacctgcatccctccgccagggctgccgcgctccctgccacctaaatctgcatctgctccaggtatttgtaggtggggttctcatagccatggttctgcatcttgttcag

SEQ ID NO: 1960 - DNA, 187 bp, Homo sapiens
ctggtgtggaagaatggcggtgagccattcagtgaaggagcggaccatctctgagaacagcctgatcatcctactgcagggcctccagggccgggtaaccactgtggacctgcgggatgagagcgtggcccacggacaccgcggccacccgcgctcggtactcgccgtctgcctagcagtgtccgcg

SEQ ID NO: 1961 - DNA, 205 bp, Homo sapiens
ccaatccagtccttcagaccctgtctgaaacttgtatcttacgtgagcttaaagaataaaatgcatttctacccccatctcgcccccaggactggcacgacaggcccacggcagattagatcttttcccagtactgatcggtgcgtggaattccagccaccacttctgattcgattccacagtgatcctgtcctctgagtatttt

SEQ ID NO: 1962 - DNA, 263 bp, Homo sapiens
ctgcgatccttcttccaccagcactacctgggtggtcaggagcccacacccagtaacatccggatggcaacccacacattgatcacggggctagaagagtatgtgcgggagagtttttccttggtgcaggttcagccaggtgtggacatcatccggacaaacctggaatttctccaagagcagtttaatagcattgctgcgcatgtgctgcattgcacagatagtggatttggggcccggttgctggagttgtgtaaccaagg

SEQ ID NO: 1963 - DNA, 222 bp, Homo sapiens
aaaccgcatctgctcaatgtcttcggccctcaggctgctgaatttctcataggacactttcaggagctcaaagatgtccacctctgcaggggggtcatcgctgctgctcagcaaggcacggaggtgcgggataggaggagagacactctgcttgttgaccacattatccaggtatctgcccagcatggtcatggcctcgccctcgtcgctgcagcccagcag

SEQ ID NO: 1964 - DNA, 443 bp, Homo sapiens; identical to SEQ ID NO: 661

SEQ ID NO: 1965 - DNA, 161 bp, Homo sapiens
ccattaaacctgcctgtgaccttgtcaacctcggccacgttcatctggatggatgcgtggtccttggcaccgatgatgcgattgctagcggagcatttccgcggcacgtacaggtccacgaactcgccggcgtcgttctgcatttcgaggctgggctgcgc

SEQ ID NO: 1966 - DNA, 147 bp, Homo sapiens
aaaaggggtaaacagtgataccatttactgaattggagttactattaaaattcaaaaactgaacatactcatttaaccacaagccagtcttagttttaaatcaggactgcccaacaaaatattctgtcagtcattcatgatctgaat

SEQ ID NO: 1967 - DNA, 192 bp, Homo sapiens
cctaccaccttcakaastckacctgtggcaaatgtggmtrccctgccaagcgcaagakaaagtataactggagtgccaaggctaaaagacraaataccaccggaactggtcgaatgaggcacctaaaaattgtatacmgyasgttcaggcatggattycgwgaaggaacaacacctaaacccaagagggcag

SEQ ID NO: 1968 - DNA, 210 bp, Homo sapiens
ctgggccagcttgctgctagagctcctcaggctctgtctcttgcgaggcaggctgttgttcttgatgagcagggacttgatgtgctcggccagcagctcgtcatgtttcatgcaccagtgccgcaggatgctggtggtgaactggtcgtcaggatggcagggccggctcagcaccatcttcaccatctcctcgctgggcttttctcttcg

SEQ ID NO: 1969 - DNA, 283 bp, Homo sapiens
ccaattgatttgatggtaagggagggatcgttgacctcgtctgttatgtaaaggatgcgtagggatgggagggcgatgaggactaggatgatggcgggcaggatagttcagacggtttctatttcctgagcgtctgagatgttagtattagttagttttgttgtgagtgttaggaaaagggcatacaggactaggaagcagataaggaaaatgattatgagggcgtgatcatgaaaggtgataagctcttctatgataggggaagtagcgtcttgtagaccta

SEQ ID NO: 1970 - DNA, 279 bp, Homo sapiens
ctgcagcctgggactgaccgggaggctctgattatttacccaccacaggtaggttgtgttctgaatctcaggttcacaggttaaggctacagcatcctcatcctccacggggtcggagttgttgctggtgatgaagggtttgggtggctctgagaggacattcaggatgactgaatcactgcgcctggcactcactgggttctgggtttcacatttgtagcttgctgtgtcatttcttgtgacattgaatagagtgagggtcctgttgccattggacag

SEQ ID NO: 1971 - DNA, 457 bp, Homo sapiens
cctgacattcctgtcttcttatattaataagaaaaataaaacaaaatagtggtaaagtgttgggacggtaaaaatttttgggggtggtatggagagacaatgggcaatgtttctcagggctgcttctagcaggattaggggcggcatgggaacctagagtgggagagattaagctgaaggaagattttgtggtaaggggtgatattatgggactgttagaagaaacatttgtcatttagaattattggtgatggcctggatacggttttgtatgaattgaaaaactaaaccgagtaagagaaggagaaaaacaggtattaaaggtctaagaattgggaggacctaggacatctataagagtgcctaaggaaattcagcatagtcctgtcagcaaagattatttatttacttcaagagttaagagtggcagtctggggatagcaccaggagatatcag

SEQ ID NO: 1972 - DNA, 547 bp, Homo sapiens
cagaaatctctgcaggcaagttgcgccagagcatattgcaggacaagcctgtaacgaatagttaaattcacggcatctggattcctaatccttttccgaaatggcaggtgtgagtgcctgtataaaatattctatgtttaccttcaacttcttgttctggctatgtggtatcttgatcctagcattagcaatatgggtacgagtaagcaatgactctcaagcaatttttggttctgaagatgtaggctctagctcctacgttgctgtggacatattgattgctgtaggtgccatcatcatgattctgggcttcctggcatgctgcggtgctataaaagaaagtcgctgcatgcttctgttgtttttcataggcttgcttctgatcctgctcctgcaggtggcgacaggtatcctaggagctgttttcaaatctaagtctgatcgcattgtgaatgaaactctctatgaaaacacaaagcttttgagcgccacaggggaaagtgaaaaacaattccaggaagccataattgtgtttcaagaagagttt

SEQ ID NO: 1973 - DNA, 510 bp, Homo sapiens
cctgtccgggggcactgagaactccctctggaattcttggggggtgttggggagagactgtgggcctggagataaaacttgtctcctctaccaccaccctgtaccctagcctgcacctgtcctcatctctgcaaagttcagcttccttccccaggtctctgtgcactctgtcttggatgctctggggagctcatgggtggaggagtctccaccagagggaggctcaggggactggttgggccagggatgaatatttgagggataaaaattgtgtaagagccaaagaattggtagtagggggagaacagagaggagctgggctatgggaaatgatttgaataatggagctgggaatatggctggatatctggtactaaaaaagggtctttaagaacctacttcctaatctcttccccaatccaaaccatagctgtctgtccagtgctctcttcctgcctccagctctgccccaggctcctcctagactctgtccctgggctagggcagggg

SEQ ID NO: 1974 - DNA, 398 bp, Homo sapiens
cctcctgcatgtgaagccctgccaatgacacagcctggagagcacctaggatgggtgttctctaatgggggaggaaggtgggcttaggaggctgctggctgaacatgcgatttgcagttattaggcaaggtggggggcctgaactcaattatagactctgtcagggctgtttgactaaagtggctaagggatcccatatcaggtctgctgtgttgaaaccaaactgcccttttaccaacgtttctgctgtgcarcccakagaagtgtcagggaaggagagggagaaatgggagaaatacatattttcaaaaacactgtctcacttcctaagggtaatcaaaagcaaccacgggtagctcttcccatttctgcaaccttatcgtagagagggatgaagg

SEQ ID NO: 1975 - DNA, 409 bp, Homo sapiens
aaataaatacttagaacacgacttggctcctacaagcatctggactctaggtctcagtactggagtgtctcacccatgggccccacgcagggacgccacggttccctcccaccccgtgatcaagacacggaatcggctgccgatggttggatcgcaatgcgccccttttctagagccttccccggccatctacaggcaggatgcggctgggaaaaagacaactggaatttctcgaaggttgatggtccgcacggttgaggattctacgtggttctcttggttcccttggtgtgtgtgtgtggaggaggccgcggcccttagatcaccttcttgagctcgtcgtacaggaccagcacgaaggcgccccccatgccccgcaggacgttggaccacgcacccttgaagaagg

SEQ ID NO: 1976 - DNA, 219 bp, Homo sapiens
aaatgtgcattacctggttacataaaggactctagaacaacttaggttcttttgggactgttgaaacattgtctttaaggacagaatgtactgggtgcctttctctgtactctgaatatgcatgtgtattgcggtggggatgggggagttgggggccctcacttggtccttctctgttgtttttttccaggacaaagccaaaggccccttgttagctgg

SEQ ID NO: 1977 - DNA, 522 bp, Homo sapiens
aaaactagaaaaagagatgaaaaagagaggtttgaccctactcagtttcaagactgtattattcaaggcttaactgaaaccggtactgatttggaagcagtagctaagtttcttgatgcttctggagcaaaacttgattaccgtcgatatgcagaaacactctttgacattctggtggctggtggaatgctggccccaggtggtacactggcagatgacatgatgcgtacagatgtctgcgtgtttgcagcccaagaagatctagagaccatgcaagcatttgctcaggtttttaacaagttaatcaggcgctacaaatacctggagaaaggttttgaagatgaagtaaaaaagctgctgctgttcttgaagggtttttcagagtcggagaggaacaagctagctatgttgactggtgttcttctggctaatggaacacttaatgcatccattcttaatagcctttataatgaaaatttggttaaagaaggagtttcagcagcttttgctgtgaagctcttt

SEQ ID NO: 1978 - DNA, 80 bp, Homo sapiens
ctggagccargaactkgagacagacagtgtgggcacgccayagagtaatggagggatgcgcctgcatgactttgtttcta

SEQ ID NO: 1979 - DNA, 493 bp, Homo sapiens
ctggaaaacgtgaatgccgagttgggcagtatgtggtcgacctgacttcttttgagcagttggcactacccgtcttgaggaatgccgactgcagcagtggcccagggcaaagagtgtgcgtcatcgatgagattgggaagatggagctcttcagtcagcttttcattcaagctgttcgtcaggcgctgtctaccccagggactataatccttggcacaatcccagttcctaaaggaaagccactggctcttgtagaagaaatcagaaacagaaaggatgtgaaggtgtttaatgtcaccaaggaaaacagaaaccaccttctgccagatatcgtgacgtgcgtgcagagcagcaggaagtgaagacacgtgcattcctgccttccgtgaaggagtgcccagttcaagaggagcctgatggagccctgcctgtcgaggctgtatgcctatggggttatggaaccttgtgggcttttctagagaaaactcaacag

SEQ ID NO: 1980 - DNA, 362 bp, Homo sapiens
acccactccaccttactaccagacaaccttagccaaaccatttacccaaataaagtataggcgatagaaattgaaacctggcgcaatagatatagtaccgcaagggaaagatgaaaaattataaccaagcataatatagcaaggactaacccctataccttctgcataatgaattaactagaaataactttgcaaggagagccaaagctaagacccccgaaaccagacgagctacctaagaacagctaaaagagcacacccgtctatgtagcaaaatagtgggaagatttataggtagaggcgacaaacctaccgagcctggtgatagctggttgtccaagatagaatcttagttcaacttt

SEQ ID NO: 1981 - DNA, 316 bp, Homo sapiens
aaataaatacttagaacacgacttggctcctacaagcatctggactctaggtctcagtactggagtgtctcacccatgggccccacgcagggacgccacggttccctcccaccccgtgatcaagacacggaatcggctgccgatggttggatcgcaatgcgccccttttctagagccttccccggccatctacaggcaggatgcggctgggaaaaagacaactggaatttctcgaaggttgatggtccgcacggttgaggattctacgtggttctcttggttcccctggtgtgtgtgtgtgtggaggaggccgcgg

SEQ ID NO: 1982 - DNA, 340 bp, Homo sapiens
aaaaaacaaacaaaaaacgacaacaactcaagcacccgctctgtgcatagcactattctaggtgcaataaaagggaatcttaaccttagaaatatgagttcactttctggaattgtattatctccttttccagagagtaaaaataaataaaatcaccattgtttactacagatctgccccaaaccacatctggttcacagaaaggctaatttctgccaaattaaagatgtaatgaactcagttcctgctttcccaaaaacacgaaagcagaattccttttcactgaaaaaaataaacagttttccatgcaagggcagtttgcttctaataagtatttttt

SEQ ID NO: 1983 - DNA, 295 bp, Homo sapiens
cctctaaagatcaaaacacccctgtcgtccaccctcctcccactccagggagctgtggtcatggtggtgtggtgaacatcagcaaaccgtctgtggttcagctcaactggagagggttttcttatctatatggtgcttggggtagggattactctccccagcatccaaacaaaggactgtattgggtggcgccattgaatacagatgggagactgttggagtattatagactgtacaacacactggatgatttgctattgtatataaacgctcgagagttgcggatcacctatgg

SEQ ID NO: 1984 - DNA, 476 bp, Homo sapiens
ctgtgtcatctttctggggcccaggaggatctgggctggtttgtctggggagacagacaggatgttgtggaggtggggtggaacctggtatggagggattaactcagtcatggcattctccgaccaaaaccacacctgtgtctctggcaggctggctggccttgctcccatccctagaactgctgcctctccctggatattccagctcaattagtgccacatatgggggaaacgacacatcccagtgggatttccaacactccccctccccatgcaacaaagcaacttacttctggagttctctcccaaggagaggacacagacacagttgtttgctgtgttatatgttagctccgaacaatggttctcatttggctaagcatcaaaatcacctagggagtcggtgcaaaacaaaatatcccagtcccctcccctgaaacactgactcaggaggtttggttgggggccaggaatct

SEQ ID NO: 1985 - DNA, 444 bp, Homo sapiens
cctgcctggagccccagatcaccccttcctactacaccacttctgacgctgtcatttccactgagaccgtcttcattgtggagatctccctgacatgcaagaacagggtccagaacatggctctctatgctgacgtcggtggaaaacaattccctgtcactcgaggccaggatgtggggcgttatcaggtgtcctggagcctggaccacaagagcgcccacgcaggcacctatgaggttagattcttcgacgaggagtcctacagcctcctcaggaaggctcagaggaataacgaggacatttccatcatcccgcctctgtttacagtcagcgtggaccatcggggcacttggaacgggccctgggtgtccactgaggtgctggctgcggcgatcggccttgtgatctactacttggccttcagtgcgaagagccacatccagg

SEQ ID NO: 1986 - DNA, 121 bp, Homo sapiens
cctcgtcaactctggcaaaggcggtgctgaggtgaaccacgtggatctcggcagggaaacggtggccttccacagtgtgctccgagcccggacgacctgcagccccccagtgcagatgcag

SEQ ID NO: 1987 - DNA, 142 bp, Homo sapiens
aaaaaaataaatgggtaaaatgcttctaaaaaatgcagatgtttataactacaatggtactaagatgggaaggagacaatgagagaagggataaaagcaaacatgttcatgtgcagggaatgtggttcaagtctttggattt

SEQ ID NO: 1988 - DNA, 238 bp, Homo sapiens
ccaattgatttgatggtaggggagggatcgttgacctcgtctgttatgtaaaggatgcgtagggatgggagggcgatgaggactaggatgatggcgggcaggatagttcagacggtttctatttcctgagcgtctgagatgttagtattagttagttttgttgtgagtgttaggaaaagggcatacaggactaggaagcagataaggaaaatgattatgagggcgtgatcatgaaagg

SEQ ID NO: 1989 - DNA, 168 bp, Homo sapiens
atgcccttgactataatgaatacttcagggatttgaatcatgtttgtgtcattagtgaaactggaaaagcaaaatacaaagcctaagatgagagttcaagttgagtttggaaacatctggagtcctattgacatcgccagtaaaattatcaatgttctagttctgtgg

SEQ ID NO: 1990 - DNA, 384 bp, Homo sapiens
ccaggctggtctcgaactcctgacctcagatgatctgcctgccttggcctcccaaggtgctgggattacaggtgtgagccaccatgcccggccaattcaggtgacttctgaattctcattctgattctggtaagttacatgggaatgctaatctacctaaatttagcccaaaagaaaagaaaatgcccctccaaaaagagctgctaataactctaggagaatggagtatcataagggcaagctaatctacccagcagccccagaacaaaagcaagggatgtccaccaagcctggtttacctgctgcggtcatcaaagggctgaaccgcaaacacgtgccctcagcttccagatccatgactgtgaggccgcttgcaggcaccag

SEQ ID NO: 1991 - DNA, 409 bp, Homo sapiens
aaagttcctgctgcaacaagtgcaattattaccaatgatggaataggaataaatcctgcacagactgctggaaatgttttctaaaacatggttcagaactgcggattattcctagagatcgtgttggaagttgttaatatctgctacttggaacatacgattgcctctcagaataaatattggtattttttgttgttgtaaaattgaaatcaggcatttaacatactatgaaaacaccaggagtcagtgattaatgaaaggtgactcatctgtccctttttgttgtccatactcttcctatgaagagggaatgcgtatgaattaaggctactactgtcacagaagatcatagtctttgatgctacctcacaacacaaacaggtagttcgttgggggcaaatgaattagc

SEQ ID NO: 1992 - DNA, 255 bp, Homo sapiens
ctggaccaggctggagcgcaatggtgagatcttggcttactgcaacctccgcctcccgagttcaagagattcttctgcctcagtctcccgagtagctgggactttagatgtatgtccctgggaagctgcatgatgtggaacacgtgctcatcgatgtgggaactgggtactatgtagagaaggtgagtgagagcatgtggatgcccctctaaacagggaagggaaattcaggggaagctctagagcgcagcatgg

SEQ ID NO: 1993 - DNA, 193 bp, Homo sapiens
aaaagtctatatttttatattggggggagggagtagaaaagcaagcccctatactgggccctattcagtggcagcttctcgttccataggattaaggaagactctgaggaaataaaagttgtttggaaaaatccaggtgtagttgctttgtatgttgtgatgggtagaagggatgaagtgaagtgtgaaggcc

SEQ ID NO: 1994 - DNA, 327 bp, Homo sapiens; identical to SEQ ID NO: 1637

SEQ ID NO: 1995 - DNA, 77 bp, Homo sapiens
ccttacttatgtcgtcagtctggggaactctccatgtgcttctatcactgtgcggttacctctttcacagccctttt

SEQ ID NO: 1996 - DNA, 404 bp, Homo sapiens
ctgcaatcccaggcagcagtgcagctatcactcagatcatggacacagcaccgtgggcatggatatgccatgctggagcccttagatgccctctagccactctggagcatcttccgatggacagtgggggaatctgaaggggctcgcttggtgctatggtctttcagaggctctgtagtgctctgtgggtggaccctgggggggcctgatctcatttgagctgattttccattacgcctgaagagtttctagggggctgcctctcactggcagagtagaaacacccactggagccaccacacacatccacctggcttcttagacaccgtcaaggaatggtgtcttcctcagtaccccacagctcccacactgtcatcccccagccaagggccatccctagaaaa

SEQ ID NO: 1997 - DNA, 197 bp, Homo sapiens
cctggtggaacttccatcaataaatcaagcgtgatcagggtgaggaacaggaaagaaggaaatatggggtgaatatcaggtggatcagagagatacagtcatggaggtcaggtgtggtatcaggaataatgtgggaggccagattgaagtccgggccaggaagaatggtaattgtgggacttaaagagtgagtacag

SEQ ID NO: 1998 - DNA, 271 bp, Homo sapiens
aaacaaataaaaggtcttggggaattctgtttggctacctgggcacgccagtctgcaccatgtgtccctgcggcgcatgagtgactggcgtatttagcccgtcacatttcattcgctgaaggaaaggcaagagagttgaaacatttttcttacttaaaaaaaatgatctttgtgaagaacatagtgagttcgtttgtcttcagtcaacagcggctgaaactgaccactgagaaatgggtgtgggcactgacagttctcccccattatttgg

SEQ ID NO: 1999 - DNA, 156 bp, Homo sapiens
ccatgccagccaggggtggggcaccaggggttcctgcaggcgcagtccctggctggccggtagctgcagcggcagcgccacgttcaataacaataaggttgtagtcctcagtggtactgcctgggaagaccttgaagacgggtggctggctgtcag

SEQ ID NO: 2000 - DNA, 134 bp, Homo sapiens
aaagaagtaagcctttatttccttgttttgcaaataaaactggctaagttggttgctttttggtgattagtcaaagagaccaaatcccatatcctcgtccgactcctccgactcttccttggcttcaaccttag

SEQ ID NO: 2001 - DNA, 220 bp, Homo sapiens
aaactacctcacatcaaacagaggaaaggatgacaccccgacttcccaggaaggcagaatgtgttctcagaagcaaccaatctactccaaactcaacttcaaaaatgacaggagaaacattacattaaataagaacatagaaataacatttcactgtggaatgctcagtggttaaaagtgttacagtgtttcacgttttaacaaaccttactcttacagg

SEQ ID NO: 2002 - DNA, 276 bp, Homo sapiens
gtgttctctcaaaaattggcagaagtggtgagaatccgtatgccccgctgaatctcctggctgactttgctggtggtggccttatgtgtgcactgggcattataatggctctttttgaccgcacatgcactgacaagggtcaggtcattgatgcaaatatggtggaaggaacagcatatttaagttcttttctgtggaaaactcagaaatcgagtctgtgggaagcacctcgaggacagaacatgttggatggtggagcacctttctatacgactt

SEQ ID NO: 2003 - DNA, 66 bp, Homo sapiens
aaagcacagatgtaattgtctaatgttctgatgggaacgtaacacttatttttatataaaaagaga

SEQ ID NO: 2004 - DNA, 433 bp, Homo sapiens
aaattggcttgctcattcttggtgcaaaggaaatagttgcatactcgctgatgaaatgggccttggaaaaacaatacagacgatctcatttctgaattatttgtttcatgaacatcaattatatggaccttttttattggtagtaccgctctccactcttacttcctggcaaagggaaattcagacttgggcttctcaaatgaatgctgtggtttatttaggtgacattaacagcagaaacatgataagaactcatgaatggacgcatcatcagaccaaacggttaaaatttaatatattgttaacaacttatgaaattttattaaaagataaggcattccttggaggtctaaattgggcatttataggtgttgatgaagcacaccgattaaagaatgatgactcccttctgtataaaactttaatagatttt

SEQ ID NO: 2005 - DNA, 236 bp, Homo sapiens
aaatgagatcattaacgtgaaactattactagtatatgtttttggagatcagaattcttttccaaagatatatgtttttttcttttttaggaagatatgatcatgctgtacaacagggtagaaaatgataaaaatagactattgactgacccagctaagaatcgtgggctgagcagagttaaaccatgggacaaacccataacatgttcaccgtagtttcacgtatgtgtattttt

SEQ ID NO: 2006 - DNA, 165 bp, Homo sapiens
gattgatgaagattactatgctagagtggaaggccgagagatcatttctaatttggcaaaggctgctggtctggctactatgatctctaccatgagacctgatatagataacatggatgagtatgtccgtaacacaacagctagagcttttgctgttgtgcctct

SEQ ID NO: 2007 - DNA, 236 bp, Homo sapiens
ccagttccgggtatacatggaactgtccggttgcttcttcattcacaagatctgactttatgacgtgtagggtgtagaatcctgtgtcattctggatgatgttctggatcagcagggatgcattggggtatattatctctcgaccactgtatgcgggccctggggtagcttgttgagttcctattacatatcctataatttgacggttgccatccactctttcacctttgtaccag

SEQ ID NO: 2008 - DNA, 264 bp, Homo sapiens
aaatcatgttccccctaaacatggctgttaacccactgcatgcagaaacttggatgtcactgcctgacattcacttccagagaggacctatcccaaatgtggaattgactgcctatgccaagtccctggaaaaggagcttcagtattgtggggctcataaaacatgaatcaagcaatccagcctcatgggaagtcctggcacagtttttgtaaagcccttgcacagctggagaaatggcatcattataagctatgagttgaaat

SEQ ID NO: 2009 - DNA, 489 bp, Homo sapiens
ctgtctcttacttttaaccagtgaaattgacctgcccgtgaagaggcgggcatgacacagcaagacgagaagaccctatggagctttaatttattaatgcaaacagtacctaacaaacccacaggtcctaaactaccaaacctgcattaaaaatttcggttggggcgacctcggagcagaacccaacctccgagcagtacatgctaagacttcaccagtcaaagcgaactactatactcaattgatccaataacttgaccaacggaacaagttaccctagggataacagcgcaatcctattctagagtccatatcaacaatagggtttacgacctcgatgttggatcaggacatcccgatggtgcagccgctattaaaggttcgtttgttcaacgattaaagtcctacgtgatctgagttcagaccggagtaatccaggtcggtttctatctacttcaaattcctccctgtacgaaaggacaagagaaa

SEQ ID NO: 2010 - DNA, 344 bp, Homo sapiens
ctgtccaatgacaacaggaccctcactctactcagtgtcacaaggaatgatgtaggaccctatgagtgtggaatccagaacgaattaagtgttgaccacagcgacccagtcatcctgaatgtcctctatggcccagacgaccccaccatttccccctcatacacctattaccgtccaggggtgaacctcagcctctcctgccatgcagcctctaacccacctgcacagtattcttggctgattgatgggaacatccagcaacacacacaagarvtctttatctccaacatcactgagaagaacagcggactctatacctgccaggccaataactcagccagtgg

SEQ ID NO: 2011 - DNA, 294 bp, Homo sapiens
ccacaaagccattgtatgtagctttagctcagcgcaaagaagagcgccaggctcacctcactaaccagtatatgcagagaatggcaagtgtacgagctgttcccaaccctgtaatcaacccctaccagccagcacctccttcaggttacttcatggcagctatcccacagactcagagccgtgctgcatactatcctcctagccaaattgctcaactaagaccaagtcctcgctggactgctcagggtgccagacctcatccattccaaaatatgcccggtgctatccgcccag

SEQ ID NO: 2012 - DNA, 210 bp, Homo sapiens
cctttggcaagattgtggcagagcgtcctggcactaactcaacaggccctgcacccatggcccctccaagagccccagggcccctgagcaagcagggctctggcagcagccagcccatggaggtgcaggaaggctatggctttgggtcaggagatgatccctactcaagtgcagagccccatgtgtcaggtgtgaaacggtcccgctcag

SEQ ID NO: 2013 - DNA, 221 bp, Homo sapiens
ctgtccagcttgctataatcaagtgaagattcagatggatcagtttatgcagcagcttcagagaatggaggccctgatttcaaaggctcagggtggtgatggagtagtacctgatacagagctggaaggcaggatgcagcaggctgagcaggcccttcaggacattctgagagatgcccagatttcagaaggtgctagcagatcccttggtctccagttgg

SEQ ID NO: 2014 - DNA, 168 bp, Homo sapiens
aaacttggttgataagtggaattaggagtatatttgaaagaatcttagcacaaacaggactgttgtactagatgttcttaggaaatatctcagaagtattttatttgaagtgaagaacttatttaagaattatttcagtatttacctgtattttattcttgaagttgg

SEQ ID NO: 2015 - DNA, 111 bp, Homo sapiens
aaaatattaaggagttttcttaattttgtttcctattaagtattattctttgggcaagattttctgatgcttttgattttctctcaatttagcatttgcttttggtttttt

SEQ ID NO: 2016 - DNA, 166 bp, Homo sapiens
aaatacagggaattataattagattggcatagttaaggccaaaactatagacattgctaccttatttatcttcaacccttgcctttaagaggcaaatgaacatgaacacaaaacacaggtgaatcttgcttggttctaagacagtgaagcaatttccccagtattt

SEQ ID NO: 2017 - DNA, 293 bp, Homo sapiens
ctgtgcagggcctgggtggccccagagaatgtgtaggtggtcctcagcaagggtgcttgaaaacagtgtttgggagacagaatggagagaggagcagagagtttaggagtaaactaacctgcttatttccaaggaaacaatggaagtttacaactcatcaatatcttctgcccaaatgagttaaaatactatatgagctctgcccaggatgcaaacatctgctatatcaagttgaattctgccagtgcaagggccaaggaatgccttcctttttttctaaccagttagagttt

SEQ ID NO: 2018 - DNA, 547 bp, Homo sapiens
aaaaatagcactttggttttatacatataattttccaatatttctcctgagatgcttaacatcctgacaagctttattaacagctgccaacactaccaaattatggcctcaagagcatgcaacatctcgttcagttttagtcttcattgtaaaacaactaccctttagttaaattctgatcagatcttaattcctaaaggcttgaagcagaaatattttgctatgcaaacattattacgtgaagcttaaaattttaggagacttattcctcaaatatgtattgacttttatgctcagtgaatctggttttgaaatcggtggatgaaattactttcctgattacaagcattatttcaagtcagttttcattgcggttcttataaatgtgctatttatccaaaattgtacctgtcctatatttagtctgaaaatttaatcaacaactactctttcttataatcacaaaagaaaatggcctgcctgggtgaaatgtaaatatatacttagtaaaataaaattgagcaggtattttatcctcagttttaac

SEQ ID NO: 2019 - DNA, 265 bp, Homo sapiens
ctgaagcatgctctgggttggtgaaggtgatgaaaccaaaacccctggaccgctgagtctcccggtccttgacaacgaccacctcagagataggtccgaaactgctgaagtggtcttccagtgcctgctcgtcggtgttaaagttgagccctcccacgaagagctttccttcttcagaggacatggcagttcaagtcctggaaattaaaacgtaaaaaacccggacgaacagcgagctcggaggagcacaaaaaacagggacggg

SEQ ID NO: 2020 - DNA, 527 bp, Homo sapiens
  misc_feature 522: n = A,T,C or G
aaaacagattttgtctgtcaccagtgcaaaaacattacagatgtctgggctaatacaaaaacacataagaatctacaactttatatttaatactctattcaaatttaactcaaagtaatgcaaaataattagaagtaaaaacttaattcttctgagagctctatttggaaaagcttcacatatccacacacaaatatgggtatattcatgcacagggcaaacaactgtattctgaagcataaataaactcaaagtaagacatcagtagctagataccagttccaacctgcccgggcggccgcccgggcaggtctgttggttgtcttgtggtcattaaagacaatgttaagaatcaggagtacttaagtgctagtggttacaaattttgttctcttcagtttttcattaagkaaattctaatagatgatatacatattacttgcagataaaaccatcatcagaaattattaaattaattgcatattttgagctactctttatggaaagaagtaaaatatttantcctt

SEQ ID NO: 2021 - DNA, 215 bp, Homo sapiens
ccatgcggggtcgaatctatctggaacccccggccatgcgtaagaagcgactactagacagaaaggtactgctaaagtcagacagcccaacaggtgatgttttactggatgaaactctgaaacacatcaaagcaactgaacccacagaaactgtccaaacatggatagagctactcactggtgagacctggaaccccttcaaattacagtaccag

SEQ ID NO: 2022 - DNA, 428 bp, Homo sapiens
aaaaaaattaatagttttctatggaactgatctaagattagaaaaattaattttctttaatttcattatggacttttatttacatgactctaagactataagaaaatctgatggcagtgacaaagtgctagcatttattgttatctaataaagaccttggagcatatgtgcaacttatgagtgtatcagttgttgcatgtaatttttgcctttgtttaagcctggaacttgtaagaaaatgaaaatttaattttttttctaggacgagctatagaaaagctattgagagtatctagttaatcagtgcagtagttggaaaccttgctggtgtatgtgatgtgcttctgtgcttttgaatgactttatcatctagtctttgtctatttttcctttgatgttcaagtcctagtctataggattggcagttt

SEQ ID NO: 2023 - DNA, 153 bp, Homo sapiens
ccttcttcttagctttcttagccactggtccatttgcctgtaactttcgctctgggaccttggcagacttgagccagaagctatagatgtctaagagggaagaggcattggcatcctgctgtgtagctcctgtcgctttggcgaacttattgg

SEQ ID NO: 2024 - DNA, 192 bp, Homo sapiens; identical to SEQ ID NO: 1738

SEQ ID NO: 2025 - DNA, 487 bp, Homo sapiens
ccaggtcatcaccattggcaatgagcggttccggtgtccggaggcgctgttccagccttccttcctgggtatggaatcttgcggcatccacgagaccaccttcaactccatcatgaagtgtgacgtggacatccgcaaagacctgtacgccaacacggtgctgtcgggcggcaccaccatgtatccgggcattgccgacaggatgcagaaggagatcaccgccctggcgcccagcaccatgaagatcaagatcatcgcacccccagagcgcaagtactcggtgtggatcggtggctccatcctggcctcactgtccaccttccagcagatgtggattagcaagcaggagtacgacgagtcgggcccctccatcgtccaccgcaaatgcttctaaacggactcagcagatgcgtagcatttgctgcatgggttaattgagaatagaaatttgcccctggcaaatgcacacacctcatgctagcctcac

SEQ ID NO: 2026 - DNA, 246 bp, Homo sapiens
  misc_feature 135: n = A,T,C or G
tctgaggtgggagtggagaatggttcccaggaagacagttccacctctaakgtccgaaaatgttccctttaccctggagtgggagtgakgggtcatacaccawaggtathtwccctcaccastctaggcatgacntggcttctgaaaaattccagcacacctcctcgaacctcattgtcakcaragagggcccatctgwtgyctgtaacatgcctttcacatgtccaccttcttgccatgttccar

SEQ ID NO: 2027 - DNA, 209 bp, Homo sapiens
cacaagtgtcttatatatgcagatctaatgtaaaatccagaacctggactccatcgttaaaattatttatgtgaaacattcaaatgtgtgcattaaatatgcttccacagtaaaatctgaaaaactgatttgtgattgaaagctgcctttctatttacttgagtcttgtacatacatacttttttatgagctatgaaataaaacatttt

SEQ ID NO: 2028 - DNA, 296 bp, Homo sapiens
ccatgtatgtgcatgcwtatacactctacagtgcwgttagaccttttggcytgcagwttcatattarggtcttacagygtgaatgacggtgcgcaactctacatgattgacccatcaggtgtttcatacggttattggggctgtgccatcggcaaagccagrcaagctgcaaaracggaaatagagaagcttcasatgaaagaaatgacctgccgtgatatcgttaaagaagttgcaaraataatttacatagtacatgacgaagttaaggataaagcttttgaactagaactyar

SEQ ID NO: 2029 - DNA, 515 bp, Homo sapiens
attccgtcctgcgcggttgttctctggagcagcgttcttttatctccgtccgccttctctcctacctaagtgcgtgccgccacccgatggaagattcgatggacatggacatgagccccctgaggccccagaactatcttttcggttgtgaactaaaggccgacaaagattatcactttaaggtggataatgatgaaaatgagcaccagttatctttaagaacggtcagtttaggggctggtgcaaaggatgagttgcacattgttgaagcagaggcaatgaattacgaaggcagtccaattaaagtaacactggcaactttgaaaatgtctgtacagccaacggtttcccttgggggctttgaaataacaccaccagtggtcttaaggttgaagtgtggttcagggccagtgcatattagtggacagcacttagtagctgtggaggaagatgcagagtcagaagatgaagaggaggaggatgtgaaactcttaagtatatctggaaagcggtct

SEQ ID NO: 2030 - DNA, 359 bp, Homo sapiens
ccacgggaagcgatgataactgcgcggcattctttgagggacccccattcaagttcaagttcacaattggcgaccacagccgctttgtcaactgtgtgcgattctctcctgatgggaacagatttgccacagccagtgctgacggccagatatacatctatgacgggaagactggggagaaggtgtgcgcgctgggcggaagcaaggcccacgacggtgggatttacgcaattagttggagtcccgacagcacccatttgctttctgcttctggggacaaaacttccaagatttgggacgtcagcgtgaactccgtggtcagcacatttcccatgggctccacggttctggaccagcag

SEQ ID NO: 2031 - DNA, 201 bp, Homo sapiens
ctggagagctcagatggagcaggtcaggaggtggaacaatggcagagtgagggtggagggcgcagtgtctggagaggcggaaatgagaaggctggggagaaagaagagggtggcagctctggtgcagggcccagagcagggagccaggtgaagagtggctggacttggctgcccccacccccacctccaggcccagagagg

SEQ ID NO: 2032 - DNA, 258 bp, Homo sapiens
  misc_feature 249: n = A,T,C or G
ctggacttgaacccacaatggcttgtgtaaattcgtaaatttcatggtttctaggaaaagctgcattggggtggggagacccagtttgcctcataggcagaggattctccaggaagcatggaaaatggaatgtttccatgctttacagtgctgggagagaggggagatgtgggcaggaccttttggaaggatgtttattctctgtggttaaagaaatgctgagaatttctagcatgtgaagcacttggnggcagcagg

SEQ ID NO: 2033 - DNA, 401 bp, Homo sapiens
aaaacaagtccaggttgggaaaaggggaagggaggggaagttctggtccctctttcccaaagtcagctttgccaaatttcaatgacaagaaggttgggtttcctacagactcccaatgtactttcatctattgacactgagagaggggcagtgaccaggcagcctggagatgcctattaggaaggaagagtaggagaaagttgtttctgtccccacccctctacccctacaggggaaaggaatctcctagtgatgagggtgagagacttgaaatacatcagcactgcagtgagcaggacaggtttcattactgcttttttacttctgaataaattatttctgtggctgttagggatggggaggctgaagttggttgtgtgggttgctgggcttcaaagttc

SEQ ID NO: 2034 - DNA, 545 bp, Homo sapiens
  misc_feature 525: n = A,T,C or G
aaacgcccaggaaaggacatgattaaagttgaccttttaatactgtagtaccttgctgttaagtaaccccactattgtgtctgcatttatcctttgttcatctactttcacttacatacagtattatataagtagagaaaaatgggaaaatgcaagcaaattcaactttattttatacattgtatatatgtacaccctacactattcatttgggttttattaaagagatagtcacaaagggcttacgaaaatcatttttgaattgataattagaatattgaataagcaatcctatgatccactaatttgttttatcagttaataatattaatcaaagacatttactgtatattctagtcattttgatttgagttaaccccaaatataaaattacctgtagtgatgtctctctcccagcccttatatgtggatattttttaagtggacttgtatgctgataattctagaccaaagtaaatatggcagaatatttatacatgaaaaaataattttgcaaatattttnctataattgtattcatttac

SEQ ID NO: 2035 - DNA, 388 bp, Homo sapiens
ggcgaagaaactacaactcccagggcgtcccggagcaggccaacgggactacgggaagcagcgggcagcggcccgcgggaggcacctcggagatctgggtgcaaaagcccagggttaggaaccgtaggcatgctgcgccccaaggctttgacccaggtgctaagccaagccaacactggaggcgtccagagcaccctgctgctgaataacgagggatcactgctggcctactctggttacggggacactgacgcccgggtcaccgctgccatagccagtaacatctgggccgcctacgaccggaacgggaaccaagcgtttaatgaagacaatctcaaattcatcctcatggactgcatggagggccgtgtagccatcacccgagtgg

SEQ ID NO: 2036 - DNA, 289 bp, Homo sapiens
ctgggtataggacaagaaaggattgggaccagggaaagtgggtgggaagctcagccagaccctacagtggcctcctccagaacttggaggacagggatcaggctgggaaggccccctggagatgggggtccacagccttcctggtccccatcctcctgggacttccttggaggagattcgcccaggcaggtgggagttgggccctggctggagggagaaatgccctgaaaagcgtcgggtcccggtaggctctagggacgtgtgcagtacagtgcatggcagttatcag

SEQ ID NO: 2037 - DNA, 449 bp, Homo sapiens
ctggtcacccaactcttgtggaagaggggaattgagatcgagtactgaatatctggcaaagaggctggaatccttcagccccagagcccagggaccactccagtagatgcagagaggggcctgcccaggggtcagggcagtgggtatcactggtgacatcaagaatatcagggctggggaggcatctttgtttcctggtgccctcctcaaagttgctgacactttggggacgggaaggggtagaagtagggctgctccttttggagctggagggaatagacctggagacagagttgaggcagtcgggctgtccaggttctaagcatcacagcttctgcactgggctctgaggagattctcagccagaggatcccagcctcctcctccctcaaatgtcagtccaagcaaataccaaagcaacgcatcgattttgtggaagtcaattagag

SEQ ID NO: 2038 - DNA, 382 bp, Homo sapiens
cctgggagatcccagggtcctccaccctccccctgaccacatacaaaggcactctagttcaagagtgaaaagtctcacccaggaggaacagccctccttgaagcaatggcagggccagcagggaggtgggcatggcagggaatggagagagtgagccagacagacttcacctccttactggacacagggtcaagggcgagtttcaattgctgctccctttactttctctacctgtgactactccctggaccaatcctgaggagggcacattttccagaagccacgtgataggggctggtttctgtggagccagaggcagagacactgaacttgagctcacctcctaacaccggcagtaaacttcctggaactttgccctcag

SEQ ID NO: 2039 - DNA, 342 bp, Homo sapiens
ctgcacaaaaacacttcagccaattctaacacagagggagcatagacatggaggggctgggggttaggctgggggagaccagccttccctgctaagggctcgtggtccaagcccacaaccagagggtgctctgggtggtgtccaggaacatgcagtgccggctccggggaggagggacgagaagagaaaggggagtcacagaggaggctgcagatgagcacgagtttattggactctggcctcgcgctgctgcttgatgaagttgatgagcccattggtagaagcgtcgtgagaggtcacttgagcactgccatcaagctcaggctctattttcttagccag

SEQ ID NO: 2040 - DNA, 329 bp, Homo sapiens
ctgaacaagaagagagccatccccaatcagggggagatcctggtgatccgcaggggctggctgaccatcaacaacatcagcctgatgaaaggcggctccaaggagtactggtttgtgctgactgccgagtcactgtcctggtacaaggatgaggaggagaaagagaagaagtacatgctgcctctggacaacctcaagatccgtgatgtggagaagggcttcatgtccaacaagcacgtcttcgccatcttcaacacggagcagagaaacgtctacaaggacctgcggcagatcgagctggcctgtgactcccaggaagacgtggacag

SEQ ID NO: 2041 - DNA, 188 bp, Homo sapiens
ctgcttagtgaaattgccaaggaacaaggttttaatataacatatttggatatagatgaactgagcgccaatggacaatatcaatgtcttgctgaactgtccaccagccccatcacagtctgtcatggctccggtatctcctgtggcaatgcacaaagtgatgcagctcacaatgctttgcagtattt

SEQ ID NO: 2042 - DNA, 285 bp, Homo sapiens
cgtggctgtctcctctctccgccatggcgtgtgctcgcccactgatatcggtgtactccgaaaagggggagtcatctggcaaaaatgtcactttgcctgctgtattcaaggctcctattcgaccagatattgtgaactttgttcacaccaacttgcgcaaaaacaacagacagccctatgctgtcagtgaattagcaggtcatcagactagtgctgagtcttggggtactggcagagctgtgctcgaattcccagagttcgaggtggtgggactcaccgctctgg

SEQ ID NO: 2043 - DNA, 525 bp, Homo sapiens
aaaaaatgagagtagggaatcaaatcatttggtactatgggaagctgctaaaataatatttgatagtaaaagtatgtaatgtgctatctcacctagtagtaaactaaaaataaactgaaactttatggaatctgaagttattttccttgattaaatagaattaataaaccaatatgaggaaacatgaaaccatgcaatctactatcaactttgaaaaagtgattgaacgaaccacttagctttcagatgatgaacactgataagtcatttgtcattactataaattttccaacatggcaaaaccctgtctctactgaaaatacaaaaattagttgggtgtggtggcacatgcctgtaatcccagccactcgggaggtgaaggcacaagaattggttgaacctgggaggcagaggttgcagtgagctgagattgcactgctgcactccagcataggcgtcagaataagactctgtcttggaaagaagaaaaaaaattgttagcctaaaaccaactctctctaattt

SEQ ID NO: 2044 - DNA, 313 bp, Homo sapiens
ccaggccgaagtcgatgatgtagaccaggttgcccttcttccccagccccatgaggaagttgtcgggcttgacgtcccggtggatgaagttcttggagtggatatactcgatgcggctgatcatctggtcggccaagagcagcaccgtcttgaggctgaatttgcgggaacagaagttgaacaggtcctcgaggctaggccccagcagctccatgaccatcacgttgtagtcgccctcagctccgcaccacttgatggacgggatccccacgccaccctgcatcatcttgtagaacttgctctcgatgtgcag

SEQ ID NO: 2045 - DNA, 256 bp, Homo sapiens
ctgctgctgtatccgggtgcttgggcggccccaggtgagctggtagggagaatagccctggtaggtaactctgttgacatcagccccacacttcaacaggagtgacaccaggtcaggattttgcaggtccactgcgaggtgaagggcagtccggccattacagggctcctgagcattgacatcagcacccaaggacaccaaaagctccacgatgcccaggtagccatggatagaggctaagtgtagacacgtgtgg

SEQ ID NO: 2046 - DNA, 118 bp, Homo sapiens
ctgcttttattaacatcagaagggcaacagtacaggaagttgggtagatgtggggacaacagagagactgtggcagaggcaggactgcagatctatggaaattgcctggaagagtcag

SEQ ID NO: 2047 - DNA, 212 bp, Homo sapiens
aaaattctttttgaatcttgaatttcttcaagatcgggtactgatgttccttcaggaataaaacaaaaggggggaaatcttcaaagcattactctgaatttcttgtgtaatgtccttccaagcactgtttctgaccatgtctcatgtggtattccagaagagcatcagttatactgtgtatctaagtcattgaggaaactgtttttaagctg

SEQ ID NO: 2048 - DNA, 99 bp, Homo sapiens
ctggggaaagagggctgtataggaaagttgcttgtagtgctgaccaagtttcttcttgctgggtttcaggttattgaagagctttcccctgcagatagg

SEQ ID NO: 2049 - DNA, 418 bp, Homo sapiens
ctgtcttctgttccaggaggaaaaagctttttattaaaaaacagaaacgaaactttagaaaatatgaaaaatcagagggaggacagaggtcatttcataaaatcgttatttgaaaacagtgcagtgtgcaaataacactcagttgggaatcgggagaccggggactagtctaactggctcaaactagctgtgaccttaggcgtgtcattcaccacttggggatcatttcctcatctaaagcattcagcacagttaccctgtaaggcactttacaggtgcaaaatcttaaggtgcccccagtgtttgctatcaagtccattctgcggacatatttggtgtcatttccttcctgatgaaaaccaggaaaggccaggaggaaatctcaggaatatattttaggcaagtccagcatctctgg

SEQ ID NO: 2050 - DNA, 295 bp, Homo sapiens
aaaactctgttgggcatgtcccttaggaatctatcctaaggttttatgcactgcctctgggtccactattgatgcttccttttgcaaatgccaacaatctgtatatatgttttgggttgtcagtcacactgagaagcagctaacagaaatgctttgtcctaatttggacatgttcaaataataaagtgaatacagacaaaaatatgatcttgcttcaaaatactgttttggtaaacaattttaattttcaagaaaagccactcccttggaagtgctcctatgtttcactcttttt

SEQ ID NO: 2051 - DNA, 358 bp, Homo sapiens
cctccattatcctgaacatactggaaagcataatccattaggccaccattgcagccttcattgccttgaggcccagagcagtctaccagattctgctcactcagtgagataagcctcccagttttccggaacatctgtccttcaagagcaccagtagcactaaaagcccaacaagaaccacactgaccctgattcttcacaggagtcacgtagcctttctctctccaatccacagatctgggggcctcataaaacagaggttcctggaacactttccccttcctgggcttacggttttgaaagccattcatcacctgcctgaattcttcactggtcatgtctccaaaggcgttcatgg

SEQ ID NO: 2052 - DNA, 402 bp, Homo sapiens
ccagagtatttcattgttgcagaggcacctggtggagaattaatgggttatattatgggtaaagcagaaggctcagtagctagggaagaatggcacgggcacgtcacagctctgtctgttgccccagaatttcgacgccttggtttggctgctaaacttatggagttactagaggagatttcagaaagaaagggtggattttttgtggatctctttgtaagagtatctaaccaagttgcagttaacatgtacaagcagttgggctacagtgtatataggacggtcatagagtactattcggccagcaacggggagcctgatgaggacgcttatgatatgaggaaagcactttccagggatactgagaagaaatccatcataccattacctcatcctgtgagg

SEQ ID NO: 2053 - DNA, 234 bp, Homo sapiens
ccaaagattctcattcctgagaagcaaaaattaggtgaggtaacttgtcagaggaagtaaattcagggctcactagagagcacagagcatttgtccatcagcagttcagtcatcgccagctctcctggtaccctcgaacacttcagaaacacacacaagtcaagtccctcgatggctacactaggcgcctatggctggagcctccttggcacgagcgcaccatccgaggcacag

SEQ ID NO: 2054 - DNA, 510 bp, Homo sapiens
ccaccaccacaagcgacccaggcaggaggcttcaagtccaaagagatttttgtaactgagggtctctccttccagctccaaggccacgtgcctgtagcttcaagttctamyaaagatgaagaagaacaaatactagccaaaattgttgagctgctaaaatattcaggagatcagttggaaagaaaggacactgccttcatccccattcccttggttgacaccagcathyagggttttccacaggatggtttgatggcctgcatttgagctaaagaatgaacttctgtctgcctcgtggagccaagctactgtactgagtgcttattcttttgtacacagacctgcccgggcggccgccgggcaggtctgtatgaccagtttttccatctccttcacttctaccttgatcagctcgaagtccagttcagtgtaagaaatggtatccttctccatgatgtcaattcggacagttaggtttaacagtttcttttcatacacactaattaattg

SEQ ID NO: 2055 - DNA, 74 bp, Homo sapiens
ctggcagcttagtgttcacatcagcggctgctttattaatagcttaaccgttgttcccttgctgctcattacac

SEQ ID NO: 2056 - DNA, 370 bp, Homo sapiens
caagcctggagaaagaattgaaatcagaaaaagagcaaagacaggctcttcagcgcgaattacagcacgagaaagacacttcctctctactcaggatggagctgcaacaagtggaaggactgaaaaaggagttgcgggagcttcaggacgagaaggcagagctgcagaagatctgcgaggagcaggaacaagccctccaggaaatgggcctgcgcctcagccagtccaagctgaagatggaagatataaaagaagtgaaccaggcactgaagggccacgcctggctgaaagatgacgaagcgacacactgtaggcagtgtgagaaggagttctccatttcccggagaaagcaccactgccggaactgtgg

SEQ ID NO: 2057 - DNA, 169 bp, Homo sapiens
ccaattgaaacaaacagttctgagaccgttcttccaccactgattaagagtggggtggcaggtattagggataatattcatttagccttctgagctttctgggcagacttggtgaccttgccagctccagcagccttcttgtccactgctttgatgacacccaccgcaa

SEQ ID NO: 2058 - DNA, 280 bp, Homo sapiens
gtgctcctaagaaagagcatgtaaatgtagtattcattgggcacgtagacgctggcaagtcaaccatcggaggacagataatgtttttgactggaatggttgacaaaagaacactggagaaatatgaaagagaagctaaggaaaaaaacagagaaacctggtatttgtcctgggccttagatacaaatcaggaggaacgagacaagggtaaaacagtcgaagtgggtcgtgcctattttgaaacagaaaggaaacatttcacaattttagatgcccctgg

SEQ ID NO: 2059 - DNA, 137 bp, Homo sapiens
ccaactgaagattgaattgccgctaacaaccatatcgtgttagtgaattttcaatatggaccaggaaggcatatgtattttgaacttgagtgaaaaggttgaagttacagacttttgcatagatggtttgtcagttt

SEQ ID NO: 2060 - DNA, 305 bp, Homo sapiens
ctggagaaggacttcagcagcatgaagaagtactgccaagtcatccgtgtcattgcccacacccagatgcgcctgcttcctctgcgccagaagaaggcccacctgatggagatccaggtgaacggaggcactgtggccgagaagctggactgggcccgcgagaggcttgagcagcaggtacctgtgaaccaagtgtttgggcaggatgagatgatcgacgtcatcggggtgaccaagggcaaaggctacaaaggggtcaccagtcgttggcacaccaagaagctgccccgcaagacccaccgagg

SEQ ID NO: 2061 - DNA, 242 bp, Homo sapiens; identical to SEQ ID NO: 1911

SEQ ID NO: 2062 - DNA, 245 bp, Homo sapiens
ctggaccaatgaaaaccaactctaccaacaatcacaaagataaaaacttgcgccagagaaacacaaattaagtactgcttacaatatctttaggttcctgaaactggtggcaacatgacctgctaaaattttctgcttggacctctttggttctctcccctttcaagtgagcaacaccacaatgactgtctaaagcatgccttatttagcctctcctgtaagggtgatctagccaggtacatttt

SEQ ID NO: 2063 - DNA, 449 bp, Homo sapiens
ctgctgggacgatcgcccaggctggagctggccccgcttggtggcctgggatctggcacactccctctccttggggtgagggacagagccccacgctgttgacatcagcctgcttcttcccctctgcggctcatcttgaaataaagccagatgagttggcaaagaaaagaggcccaaatattgagaaatcagtgaaggatttgcaacgctgcaccgtttctctaactagatatcgcgtcatgattaaggaagaagtggatagttccgtgaagaagatcaaagctgcctttgctgaattacacaactgcatcattgacaaagaagtttcattaatggcagaaatggataaagttaaagaagaagccatggaaatcctgactgctcgtcagaagaaagcagaagaactaaagagactcactgaccttgccagtcagatggcagagatgcag

SEQ ID NO: 2064 - DNA, 242 bp, Homo sapiens
ccaagggtcatgatggcaggagtaatcagaggtgttcttgtgttgtgataagggtggagaggttaaaggagccacttattagtaatgttgatagtagaatgatggctagggtgacttcatatgagattgtttgggctactgctcgcagcgcgccgatcagggcgtagtttgagtttgatgctcaccctgatcagaggattgagtaaacggctaggctagaggtggctagaataaataggagg

SEQ ID NO: 2065 - DNA, 284 bp, Homo sapiens
aaaacagattttgtctgtcaccagtgcaaaaacattacagatgtctgggctaatacaaaaacacataagaatctacaactttatatttaatactctattcaaatttaactcaaagtaatgcaaaataattagaagtaaaaacttaattcttctgagagctctatttggaaaagcttcacatatccacacacaaatatgggtatattcatgcacagggcaaacaactgtattctgaagcataaataaactcaaagtaagacatcagtagctagataccagttcca

SEQ ID NO: 2066 - DNA, 393 bp, Homo sapiens
ctgaagtgctggactccctggtcagcaatgtcaacattgagctgctcaatgccctccgctaccatatggtgggcaggcgagtcctgactgatgagctgaaacacggcatgaccctcacctctatgtgccagaattccaacatccagatccaccactatcctaatgggattgtaactgtgaactgtgcccggctgctgaaagccgaccaccatgcaaccaacggggtggtgcacctcatcgataaggtcatctccaccatcaccaacaacatccagcagatcattgagatcgaggacacctttgagacccttcgggctgctgtggctgcatcagggctcaacacgatgcttgaaggtaacggccagtacacgcttttggccccgaccaatgagg

SEQ ID NO: 2067 - DNA, 116 bp, Homo sapiens
aaaaccagattgaattattttcttctgtgaagctttccctgacaccccgggaaagaataatgtttccacagtgttttgtcatttactccataaaagaaacaaaaacatgtattttt

SEQ ID NO: 2068 - DNA, 240 bp, Homo sapiens
aaataatgtataggtgactgcaggactgcagcattggtaactagataaccaactagaaaccagctaacaaagaactgtctaaatacttaaaatacagctcttgttgagatcatcctttgttttgatcatcttcttgggggaaaaaagcctgctgctggtcacaatggaaatatattaaggccaaatcttctgatatccattcccaaaggtttctttcagacctcggccggcgaccacgct

SEQ ID NO: 2069 - DNA, 152 bp, Homo sapiens
ccacagagctgtcccagaatgccaggcaccttcagggtggggagaaacagcgggtcttcactggtattgttaccagcttgcatgactactttggggttgtggatgaagaggtcttttttcagctaagtgtggtgaagggccgtctgccccag

SEQ ID NO: 2070 - DNA, 341 bp, Homo sapiens
gcttcctgtccgaatcagcatgattcttcagaggctcttcaggttctcctctgtcattcggtcagccgtctcagtccatttgcggaggaacattggtgttacagcagtggcatttaataaggaacttgatcctatacagaaactctttgtggacaagattagagaatacaaatctaagcgacagacatctggaggacctgttgatgctagttcagagtatcagcaagagctggagagggagctttttaagctcaagcaaatgtttggtaatgcagacatgaatacatttcccaccttcaaatttgaagatcccaaatttgaagtcatcgaaaaaccccagg

SEQ ID NO: 2071 - DNA, 244 bp, Homo sapiens
cctctttttaccagctccgaggtgattttcatattgaattgcaaattcgaagaagcagcttcaaacctgccggggcttctcccgccttttttcccggcggcgggagaagtagattgaagccagttgattagggtgcttagctgttaactaagtgtttgtgggtttaagtcccattggtctagtaagggcttagcttaattaaagtggctgatttgcgttcagttgatgcagagtggggttttgc

SEQ ID NO: 2072 - DNA, 501 bp, Homo sapiens
ctggtcttccgcaaggagggctgggctttggagtgagggcagtgcggtggaggtgagggggtgagcctggacctgtgggcgagtcccattggctgggctctggcctgatcactgggctcaggtcagggcttggttcccttgccacccttcttgctgccccatgagtgtggcattactggtcacttggaagaagacagtgactctttttccctgctgggtagcattttgtatggaacggttggaattttctgggcccagttcccacgtgcctttcgtggcagtctaacctcaggccattctcttcccctgtgtgcctcagtgtccttctcatttcagtagggacttctgaaatgggggaggcagtgtggaatactgtggatgtctgtgcagagcctttgccggcactgaaggcatgcagcctgtcggcagagtgtcttaacaccagatgctactttttactgtattgtagtttattgccccggagatgtggggctttttttt

SEQ ID NO: 2073 - DNA, 407 bp, Homo sapiens
aaaatccctcaaaaactgtttattatacaagtgagttttgagtcacgatgggcttatcggtaggatttctggtagcgagcgcgggcaccagggcctccaaactttttggactcgcagcgacgagggtcagctaccagcagggtccggtcatactggatgaggatgtctttgatctccctcttggaagcctcatccacatatttctggtaataggccaccagggctttggagatggactgamkggatagcataaatctgggccacgtgaccaccaccctttacacggacacggatgtctacaccagcaaatcgctccttgccgagaagcagaactggctccagcagcttgtactgtagcgtgcgcggctcaatcatctccaggggccgcccgttcaccttgatgagac

SEQ ID NO: 2074 - DNA, 424 bp, Homo sapiens
tttttttttttttttttttttttatgtgttgcgtgcaggtagaggcttactaraagtgtgaaaacgtaggcttggattaaggcgacagcgatttctaggatagtcagtagaattagaattgtgaagatgataagtgtaragggaaggttaatggttgatattgctagggtggcgcttccaattaggtgcatgagtaggtggcctgcagtaatgttagcggttaggcgtacggccagggctattggttgaatgagtaggctgatggtttcgataataactagtatggggataaggggtgtaggtgtgccttgtggtaagaagtgggctagggcatttttaatcttaragcgaaagcctataatcactgcgcccgctcataaggggatggccatggctaggtttatagatagttgggtggttggtg

SEQ ID NO: 2075 - DNA, 341 bp, Homo sapiens
ctgcccaagggcgttcgtaacgggaatgccgaagcgtgggaaaaagggagcggtggcggaagacggggatgagctcaggacagagccagaggccaagaagagtaagacggccgcaaagaaaaatgacaaagaggcagcaggagagggcccagccctgtatgaggaccccccagatcagaaaacctcacccagtggcaaacctgccacactcaagatctgctcttggaatgtggatgggcttcgagcctggattaagaagaaaggattagattgggtaaaggaagaagccccagatatactgtgccttcaagagaccaaatgttcagagaacaaactaccag

SEQ ID NO: 2076 - DNA, 191 bp, Homo sapiens; identical to SEQ ID NO: 1913

SEQ ID NO: 2077 - DNA, 397 bp, Homo sapiens
ccaggataatatacacaggtttgcggctaaaactgtgcacagtgggtcattgatgctagtcacagtggaactgaaggaaggctctacagcccagcttatcataaacactgagaaaactgtgattggctctgttctgctgcgggaactgaagcctgtcctgtctcaggggtaacctgcttacatctggactttagaatctggcacacaacaaaagtgcctggcatccactactgctgcctttcatttataataatagcccttccatctggcagtgggggtagaatacactcttgacattcttgtctcctgctttagaatgctagtgtgtatctaccatgtatgcaatactttccccctttttgctttgctaaccaaagagcatatattttactgtcag

SEQ ID NO: 2078 - DNA, 178 bp, Homo sapiens
cctagcctcgtcccaagctaaatgtaagccagttgggctgtgttaaaggaagcagtgtttttggttcgattctgcctctgtagctcaaggggggcagcccccagagtcctgtgcattctgccaaggctccatagctttgccaaatgcacggagctctgccattccggtgcagtgcagg

SEQ ID NO: 2079 - DNA, 327 bp, Homo sapiens
ttggaagagaaaataaatgactgtgccgaagtgaagcaggagctggcggcctccaggacggcccgggatgctgcgttggagcgggtgcagatgctggaacagcagattctcgcttacaaggatgacttcatgtcagaaagggccgatcgggaacgggctcaaagtaggattcaagaactggaggaaaaggtcgcctctttgctgcaccaggtgtcctggagacaggattctcgagagccagacgccggccggattcacgctgggagcaaaactgccaagtatttggccgccgacgcattagagcttatggtgcctggtggctggagg

SEQ ID NO: 2080 - DNA, 266 bp, Homo sapiens; identical to SEQ ID NO: 1548

SEQ ID NO: 2081 - DNA, 478 bp, Homo sapiens
ctgaaccctcgtggagccattcatacaggtccctatttaaggaacaagtgattatgctacctttgcacggttagggtaccgcggccgttaaacatgtgtcactgggcaggcggtgcctctaatactggtgatgctagaggtgatgtttttggtaaacaggcggggtaagatttgccgagttccttttactttttttaacctttccttacgagcatgcctgtgttgggttggcagtgagggtaataatgacttgttggttgattgtagatattgggctgttaattgtcagttcagtgttttaatctgacgcaggcttatgcggaggagaatgttttcatgttacttatactaacattagttcttctatagggtgatagattggtccaattgggtgtgaggagttcagttatatgtttgggattttttaggtagtgggtgttgagcttgaacgctttcttaattggtggctgcttttagg

SEQ ID NO: 2082 - DNA, 304 bp, Homo sapiens
cctaaagagcttgtacggaagccctatgtgctgaatgacctggaggcagaagccagccttccagaaaagaaaggaaatactctgtctcgggacctcattgactatgtacgctacatggtagagaaccacggggaggactataaggccatggcccgtgatgagaagaattactatcaagataccccaaaacagattcggagtaagatcaacgtctataaacgcttttacccagcagagtggcaagacttcctcgattctttgcagaagaggaagatggaggtggagtgactggtttacatcacag

SEQ ID NO: 2083 - DNA, 106 bp, Homo sapiens
aaaacctatgaaggtatgatgcacagttcgtgtcaacaggaaatgatggatgtcaagcaattcgttgataaactcctacctccaattgattgacgtcactaagagg

SEQ ID NO: 2084 - DNA, 147 bp, Homo sapiens
caggtcctaaactgccaacacctctaaccatctgattaggtttctatgagccaagtcttacatattccattcatcatgaccttttagtcaatgtagcaacagggattccaacattttgctaaggaatggcccgctagggaaactttt

SEQ ID NO: 2085 - DNA, 310 bp, Homo sapiens
cctcgggggttctgcatctccctctgtttgggcataggtgtcagggatctcatacagcactttgggagtggatttctttttccggaggaaagtcagcttccaccaaccaatttcagtcgtcatggcgctccctaagccaaggatggggctttctgctgtaatcccgactgctccaggctggaggtgagacctttcctagagaagcagttgagtgtaggagctgcctgggagggtgagactcgggaagcaagtggtgcctccgggctgctgtatcaggcaaggctcagccaggagaggtgggtaggagcag

SEQ ID NO: 2086 - DNA, 154 bp, Homo sapiens
  misc_feature 91: n = A,T,C or G
aaagtagtcttccgtggttgggaagcctcacctcccaagaccagagtcagttggagctggttgttgttggaagggagtgggttggggaacntggggtgggggcagggagatccccccgctctgctggcggtcctaggtggagaagaactgcact

SEQ ID NO: 2087 - DNA, 407 bp, Homo sapiens
gtggtgttcagagctgtgaaggagagtcagagtgagggaatcaagggtgatgggtgctttttcagacagggcctttctctattaaacaggcttccagtggaagactctgctaatgtttagcagataaccaaaatgcatcagttagaaaaaaatatgatgagaatgagggactggttataggaatgcaattgggcacaaatgtgggaagagctgggtagtgaagctctagaagggagaggtagagaattggaagaagaagcactggtacaggtagacaattcagaacttgcacagaatctgagaagctgaaataggactgtgattgggagcttgtggagaggtctatggaaattatcatgctgctgaaattgttgcctctatttatctgctacccttctggtccgtgg

SEQ ID NO: 2088 - DNA, 75 bp, Homo sapiens
gaaaagattgatcgccgttctggtaaaaagctggaagatggccctaaattcttgaagtctggtgatgctgccatt

SEQ ID NO: 2089 - DNA, 398 bp, Homo sapiens
ccatctataccatctatagaaattttgaacatcttatacctgatgctcctgaactgatacatgattttctggtgaatgagaaggatgcaagttgcaaaaggaatgcatttatgatgctaattcatgcagatcaggatcgagctttggattacttaagtacttgcattgatcaagttcaaacatttggagacattctgcagaaaatagcaacccagtcacaaataactcctccaggaacgccatcatctgctctttcatcaggggagcaaagagctgctctgaatgctaccaatgctgtcaagagactccaaaccaggcttcagcctgaagaatctactgagactgtagactcaagctacgttgtgggacacgtgctgaactcaaggaagcaaaaacag

SEQ ID NO: 2090 - DNA, 295 bp, Homo sapiens
aaaatggaaacatcaattttattaacaatttacggcaatagacatttacagaacaaaaataagacagttccaagacaaaggagtgtaaaagtacagcacacaggttaatactcttcaccctcatcctctccgtcagcactatctgctccaacctcctcataatccttctcaagggcagccatgtcctcacgggcctctgaaaactcgccttcctccatcccctcacccacgtaccagtgaacaaaggcacgcttggcatacatcaggtcaaacttgtggtccaggcgagcccagg

SEQ ID NO: 2091 - DNA, 459 bp, Homo sapiens
ctcaccagtctcttcaccgacagcttagtcaaagaaggcattgcggcctcatttgctgtcaagcttttcaaagcatggatggcagaaaaagatgccaactctgttacctcgtctttgagaaaagccaacttagacaagaggctgcttgaactctttccagttaacagacagagtgtggatcattttgctaaatacttcactgacgcaggtcttaaggagctttccgacttcctccgagtccagcagtccctgggcaccaggaaggaactgcagaaggagctccaggagcgtctttctcaggaatgcccgatcaaggaggtggtgctttatgtcaaagaagaaatgaaggggaatgatcttccagaaacagcagtgattggtcttctgtggacatgtataatgaacgctgttgagtggaacaagaaggaagaacttgttgcagagcaggctctgaagcac

SEQ ID NO: 2092 - DNA, 317 bp, Homo sapiens
aaagaattgctctccatctcctttggcaaagttcctttgccctttgtcttatttttgtgaaaccctccaaggtatttccagtccatttgcatccaatctggcatctttacggagagcggtctcatatgctattgttgttaacgtggactagtatttatgtgttgagaacactggctgtttgtcaggaaaagtgtgccaaaacaaagagtacggccggccctggaaatgcatcagcaaaacccatttcccccgtgcactcattctgagcttccttccttcatttctgtcattactgctgagaactggactgtgcccag

SEQ ID NO: 2093 - DNA, 145 bp, Homo sapiens
aaataaatatgaccttccaaagaagataaaaaggggaccttgtccagaacaaacttagtatttcctactgaagacaatgataatgtgtaagatccaacaagggcgaagttgctggttcgcacagcactaagacctcctggactgg

SEQ ID NO: 2094 - DNA, 242 bp, Homo sapiens; identical to SEQ ID NO: 1911

SEQ ID NO: 2095 - DNA, 522 bp, Homo sapiens
aaacctgcaaacaatataaagaggtaaggacttctgacgccaaaccatgcaagtaataacaaaggaacagagaaaaatattaataacaaaaagaaaatcattaaaaataaaaaaacaaagtacttcacatttcacagcagtgctttggcagtactggcaagcatttctggtcaactgcttccaacagcaggaatatgaagaaacccccagatcttagcaaaagtgtaacaacatcttctccctgacagcttacattccaagtcattccataccataccgctccactccacagttttataaacctgatcttaagatgtaactaggtactatgtgtgctcacaataaaaactaactaaaaacaaatcagagggtagcagacaagtaaacaaagtttccagtaaggcatcaggagatcactgctggtgggcccctcactttaccagcttaaagaagttttgatttttatttctcagcaaactcaatattcagaagctttaccagcagactcaagtcaaaggtttt

SEQ ID NO: 2096 - DNA, 261 bp, Homo sapiens
ccagggctaccttatcaaggacggcaagctgatcaagaacaatgcctccactgactatgacctatctgacaagagcatcaaccctctgggtggctttgtccactatggtgaagtgaccaatgactttgtcatgctgaaaggctgtgtggtgggaaccaagaagcgggtgctcaccctccgcaagtccttgctggtgcagacgaagcggcgggctctggagaagattgaccttaagttcattgacaccacctccaagtttgg

SEQ ID NO: 2097 - DNA, 315 bp, Homo sapiens
ggacaacgggctctgtggcaagatctatatctggaaggggcgaaaagcgaatgagaaggagcggcaggcagccctgcaggtggccgagggcttcatctcgcgcatgcagtacgccccgaacactcaggtggagattctgcctcagggccatgagagtcccatcttcaagcaatttttcaaggactggaaatgagggtgggcgtcttcctgccccatgctcccctgccccccaccacctgcctgcttgcttctctggctgcctggtcagtgcagaggtgccccctgcagatgttcaataaaggagacaagtgcttt

SEQ ID NO: 2098 - DNA, 120 bp, Homo sapiens
tgtacaagctttttttttttttttttttttttttttttttacaacattaaattcaatttatttcacattaatgtttgcaaatacatcatcaattyttacatwtttcaaatcaacttcaar

SEQ ID NO: 2099 - DNA, 186 bp, Homo sapiens
ctgaacgtgtgaccctcccagcaggcgctgaggccagatcccctcagggtcctgatgagtgtggcgccatctgccttacagctccgtgtccgcagcctgcccggagaggacctgagggcccgtgttagctacaggctgctgggggtcatctcactgctgcacctggtgctgtccatggggctgcag

SEQ ID NO: 2100 - DNA, 453 bp, Homo sapiens
cctacctgggactcctggagctgtcagccgcccgggagaagcacgaggagttctgtgtccccatggtcatggttcccgctactgtgtccaacaatgtgccgggttccgatttcagcatcggggcagacaccgccctgaacactatcaccgacacctgcgaccgcatcaagcagtccgccagcggaaccaagcggcgcgtgttcatcatcgagaccatgggcggctactgtggctacctggctgctgttttgttccgaatgtctgaggacaagccacaagattacaagaaacggctttcagttgagctgaccagctctctcttcagaacagagccaatggcttggaatgagactgctgatcttggacttgatattggtgcccagggagaaccccttggatatcgccaggatgatcctagctatcgttcttttcactctggtggatatggacctg

SEQ ID NO: 2101 - DNA, 475 bp, Homo sapiens
aaagggtttctatgtgtatcagtgtaatagtgttttaccaccaactgcctttctttgttcctagttactgtaacaaatatttgatgatagaggtttattaattttgtttatccagaccattaattttatttgtttttgttctatgtaatcaaataaaatttgagtaacatgtaatggtaaggattaatgcatggttatttggaccagaaaaaagtgccatagaagaccaataactgtttagttgaggctagtctggaacctttcattagagcaatatttggttattgcacttcatttttatttactaagaaatgcaatttgggaatttttaatctgttatgctttgtttatcaaccttgattttaattaagacttttataagactagcttaaaacaccaaccaacattatttttgcaaaagtgagttggactcactttccattcttgctagtcagagtaagtaggcagcactttt

SEQ ID NO: 2102 - DNA, 492 bp, Homo sapiens
cacgccgccgcttgtgctgcagccatgtctctagtgatccctgaaaagttccagcatattttgcgagtactcaacaccaacatcgatgggcggcggaaaatagcctttgccatcactgccattaagggtgtgggccgaagatatgctcatgtggtgttgaggaaagcagacattgacctcaccaagagggcgggagaactcactgaggatgaggtggaacgtgtgatcaccattatgcagaatccacgccagtacaagatcccagactggttcttgaacagacagaaggatgtaaaggatggaaaatacagccaggtcctagccaatggtctggacaacaagctccgtgaagacctggagcgactgaagaagattcgggcccatagagggctgcgtcacttctggggccttcgtgtccgaggccagcacaccaagaccactggccgccgtggccgcaccgtgggtgtgtccaagaagaaataagtctgtagg

SEQ ID NO: 2103 - DNA, 347 bp, Homo sapiens
ccaggctggtctcaaactcctgacctcaagtgatctgtgtgccttggcctcccaaagtgctgggattacagatgtgagcacctggcctctgcttttgtacttcataagcacttcaaattctcacatacaatgtgtctccctcaaactttgttatgaggtcagcacattacccatctcacatgaaaataaataataaaaatactccaatctccaactaagtttattcaaattataaaagctgtgtcatagaaatgacaattatctcctttatcttacgaagaccatcagaaaattctagtttgaatacacatggatgtcgtattacaatgatgcttctccttgctttt

SEQ ID NO: 2104 - DNA, 223 bp, Homo sapiens
ccttctgttccagcagcccgacctggactctgccctccagatcgccagagcagagatcataaccaaggagagagaggtctcagaatggaaagataaatatgaagaaagcaggcgggaagtgatggaaatgaggaaaatagtggccgagtatgagaagaccatggctcagatgatagaggacgaacagagagagaagtcagtctcccaccagacggtgcagcag

SEQ ID NO: 2105 - DNA, 200 bp, Homo sapiens
ctgccacctgtccggcgattctgtccagatctctttgtccctgaggtgtcagtttgcggccgccatcttggtccttttccaccattttcagcccctccagggcttggaggacccggcgggccacactcttggagcctcggctgaagtggctgggcatgacgccgtttctctgacgtcccccatagatcttggtcatggag

SEQ ID NO: 2106 - DNA, 184 bp, Homo sapiens
ttttttttccttttaatgctttattgggattgcaagcgttacaaggttaaagacaaaacccaagcatgggattttgccggaaatattagcgttaaaggagctgagttgagtcaaacacgggccgcaaggtggaccgaggcggcaggcacaggtgacattcagtgtttggcgtgggggtcttcag

SEQ ID NO: 2107 - DNA, 173 bp, Homo sapiens
gccctgtggaacgaagagaggcacacagcatggcagaaaaccgagagccccgcggtgctgtggaggctgaactggatccagtggaatacacccttaggaaaaggcttcccagccgcctgccccggagacccaatgacatttatgtcaacatgaagacggactttaaggcccag

SEQ ID NO: 2108 - DNA, 265 bp, Homo sapiens
cctggcctcctgagtcccacagcttcctagccacagtgataaaagaatgggtatataacttaagccgggctaaggaaagcccttaacagaacttctgctggaactactggaaagaaggctttatggagatcccaggaaccaaggaccatgtaagcctgaatttgtgccatgtggagagagtctgtctgaggagaaactcggatgctagcagaaatggaaagagaactaagttctgatgtcatttttctggaggccctagatccag

SEQ ID NO: 2109 - DNA, 305 bp, Homo sapiens
ctgctccatgttggcgtccaggacggccagggccacctgcaggatcaccttgatgccctcatagaaaaagcagtcgacgatgaccacggcgctctcgaagggcatgacgctgaggaagagggtcaggaaccaggacagcgagatgctggagatcacccccaggtcctgcatcttctccgagagctgcggcaggaagtctctcgtgagctcttcgaagatgccttggtccaccagggctcccaccaccctggtgctgtagtagtcgggcagcatgcgctcgcacagggccaccaggagccagaagg

SEQ ID NO: 2110 - DNA, 165 bp, Homo sapiens
ctgaaaaagttagaattataaaatatttgttgggagagctcaaggccctggtagcagaacaagaggattcagaaattcagaggttgattacagaaatggaggcatgtatatctgtacttccaacagtaagtggaaacacagatattcaagttgagatagcactgg

SEQ ID NO: 2111 - DNA, 171 bp, Homo sapiens
cctgaataaggtctttgatgacctaaccctacataaaacagatttggagattcaaattgaagaactgaataaagacctagctctcctcaaaaaggagcatcaggaggaagtcgatggcctacacaagcatctgggcaacactgtcaatgtggaggttgatgctgctccagg

SEQ ID NO: 2112 - DNA, 165 bp, Homo sapiens
aaaagaaactttgagactctaaaacagaatgagataatgtattttacgttgtctataatcattaaatcactccctgtgtaatttgtgagaaccatctagtagctcgaaataaaataatgttgcatcttttctcccttgccatatactttgagataaggatttatc

SEQ ID NO: 2113 - DNA, 334 bp, Homo sapiens
aaacggttctttgtcttttctgttttatttttctcaagctgctttcaggagctagcagaaaataactcaaagttgaagactctggaagattttgctttaacctaactcgcattgatgtattaaatttataattttagcattcccaatagatcctatcattccttaaacataataccctttgtcttggagtagaatactaagttagagttagtggatttctagytwaggagaggagctcaaaactataatctttaacaaattgaaaaatgaaatagggtgttttccctttttgtgcacacctatattaccttaagaaatttccttccatagacag

SEQ ID NO: 2114 - DNA, 382 bp, Homo sapiens
ttttttttttttttttttttttttttttctttttttttttttaggcccatttgagtwttttgttttcaattagggagatagttggtwttaggattaggattgttgkgaagtatagtmcggatgctacttgtccaatgatggtaaaagggtagcttactggttgtcctccgattcaggttaaaatgaggaggtctgcggctaggagtcaataaagkggttggcttartgggcraaatattatgctttgttgttkggatatatggaggatggggattattgctaggatgaggatggatagtaatagggcaaggacccctcctadtttgttagggacggatcggaaaattgtktaggcraataggaaatatcatttgggcttgwt

SEQ ID NO: 2115 - DNA, 267 bp, Homo sapiens
ctgtgcatgctcaaatagcaagacgtgcaaaacacatcctcactctgctagaaataaagagtacacaggaagtacatgacatcaagaacctgcttctgactactggggcagatattcaagaaacctctgcaccaaaggtgaagggtaagcagagaaatggcaacacctgggggtgagggagaaagagagacgcacatatacgcatgtgctcacatgcacacatgaccgcctatgaaggctgcctgattactccgggcccacaagcag

SEQ ID NO: 2116 - DNA, 272 bp, Homo sapiens
ccggagcccacggtggtcatggctgccagagcgctctgcatgctggggctggtcctggccttgctgtcctccagctctgctgaggagtacgtgggcctgtctgcaaaccagtgtgccgtgccagccaaggacagggtggactgcggctacccccatgtcacccccaaggagtgcaacaaccggggctgctgctttgactccaggatccctggagtgccttggtgtttcaagcccctgcaggaagcagaatgcaccttctgaggcacctccag

SEQ ID NO: 2117 - DNA, 115 bp, Homo sapiens
ccagttatcccttccttttagcctagttcatccaatcctcactgggtggggtgaggaccactccttacactgaatatttatatttcactatttttatttatatttttgtaatttt

SEQ ID NO: 2118 - DNA, 245 bp, Homo sapiens
cccgctggtgctggcacaggagcttgggatccgtctcctctttcgcctcctgcaccttgggagccccgggctactcccccacagcccctgttgccctgtgatctgtaggtccttggggacgcatagttaaggtgccaggacatcctggaagctgggaaatgatttcttccagaccatggctggagaaggaaagaaggtgtgttttgcctgactcagtgactatagagagaaccaagttctgcagg

SEQ ID NO: 2119 - DNA, 370 bp, Homo sapiens
ccttacgaaggttaagagaactttccccgtgtctcacaggtaggtagaggcagagctggaactagatatctggtctgttgactctagctcagtgtcttctggtaactgttgaaaattgtcttagtttgagagatggctgaaataatgaacataaaatgctatttataataacaagtatatgtgaaatttcttattgtaagactactaccggcttactgttgaatagtttggttatagtgtttaggctagaaatgcctcccacattggtaataaacattacaaaatacaatgtatttttaggtaggcattttataaaatgcattatgccatggttgcttttgagatagattgtagtctgggtagcatcttt

SEQ ID NO: 2120 - DNA, 137 bp, Homo sapiens
ccgggatccgtatcggtttaagaagcggacggagctgttcattgccgccgagggcattcacacgggccagtttgtgtattgcggcaagaaggcccagctcaacattggcaatgtgctccctgtgggcaccatgcctg

SEQ ID NO: 2121 - DNA, 245 bp, Homo sapiens
cctacagacttatttcttcttggacacacccacggtgcggccacggcggccagtggtcttggtgtgctggcctcggacacgaaggccccagaagtgacgcagccctctatgggcccgaatcttcttcagtcgctccaggtcttcacggagcttgttgtccagaccattggctaggacctggctgtattttccatcctttacatccttctgtctgctcaagaaccagtctgggatcttgtactggc

SEQ ID NO: 2122 - DNA, 132 bp, Homo sapiens
cctcagcctcatcctccccaggacccctgtccaggatggagggtccaatcctaggacagccttgttcctcagcacccctagcatgaacttgtgggahggtggggttggcttccctggcatgatggacaaagg

SEQ ID NO: 2123 - DNA, 252 bp, Homo sapiens
ctgctttgcgatgttgtggcgaaggtccctctgagttgtgtactcaaagtactggttgccgccaaggccgtggcaggagtacatgatgaggggcttccccccgcggttgttctcacccacatccaggcattggttggtgccgaggttcttgatggcaccatagaaggtgggcgtcaggtcaggaacaaacatctctgggtagacattgtgcaggtaccaggaaaagttgtgacagtgcagttgttccctcag

SEQ ID NO: 2124 - DNA, 514 bp, Homo sapiens
cctacacaggcttttcctccaactcggaacgtgggactgaggcaggccaagttggtgagcctggcattcccactggtgaggctgggccttcctgctcttcagcctctgacaagctgcctcgagttgctaagtccaagttctttgaggacagtgaggatgagtcagatgaggcggaggaagaagaggaagacagtgaggaatgcagcgaggaagaggatggctacagcagtgaggaggcagagaatgaggaagatgaggatgacaccgaggaggctgaagaggacgatgaagaagaagaagaagagatgatggtgccagggatggaaggcaaagaggagcctggctctgacagtggtacaacagcggtggtggccctgatacgagggaagcagttgattgtagccaacgcaggagactctcgctgtgtggtatctgaggctggcaaagctttagacatgtcctatgatcacaaaccagaggatgaagtagaactagcacgcatcaagaatgctgg

SEQ ID NO: 2125 - DNA, 524 bp, Homo sapiens
ccactttgtggacattaggatagcagctttggaagcagttgttgattatactaaagtggacagaagttatgaagaactgcaatggctacttaatatgattcagaatgaccctgtaccctatgtaaggcataagattctcaacatgttgactaagaacccaccatttactaagaacatggagtctcccttatgcaatgaagccctggtagatcaactttggaaacttatgaattctggtacttcacatgactggaggttacggtgtggtgctgtggacttgtacttcacactttttggcctcagtagaccttcctgtttacccttgccagagcttgggttggttcttaatctaaaggagaaaaaagctgtcttgaatcctaccataattccagagtcagtagcaggcaaccaagaagctgcaaataatccaagcagtcacccacagctagttggatttcagaaccctttttccagttctcaagatgaggtggagattgatatggatactgttcatgatagccagg

SEQ ID NO: 2126 - DNA, 533 bp, Homo sapiens
  misc_feature 491: n = A,T,C or G
ccatcacctgtggaatagcacagaagttaaacacactctggtttctgagtctcgaaaggtaggtgatgacatctgggatgtggtgcagtgcattggttataagttcattcaggcactgcacggccaagtcaatattctccggcttagcaaaatcccctaacttcttaacatacctgctccaaacctcttgaggccagaactctcttcctccttgctggtcttccagatagtcacggatgatgtttgttttctgcagaaacaggcccatagagttggcacgttctgtatcttcaccaactaaggggtcttcaaactctgaggctgagaaaagacgggaaaggccaattccgaccagcccagcaacatagtggcagtacttgtcccactcctgttcagaggtcacatgcttatccaaaaactctgccatcccaatgcccattctccggcaaatgtcggcaatcactgtttggtatttctcagccagatttctnaactcaagggagatcgttgggaagtcctccagcacctggcga

SEQ ID NO: 2127 - DNA, 230 bp, Homo sapiens
ttgaagattgaattcacagtgttgtatcccatgtagggaaaaataagactaattttccccccacactctaacacactgtaattttgcacttggaactttgctaatctactgtccaacctccttctcaacaaagtcaaatcaaaggagaattaacctagaagaggggacaataaaataagaggtcctcagggagagggagaaccaaggaaatagaatctacttaaatctgg

SEQ ID NO: 2128 - DNA, 265 bp, Homo sapiens
ctgtcgaagtacatcgagcccctgcgccgcatgatcaacaagatcgacaagaacgaagacagaaaaaaggacctgagtaagatgaagagccttctggacattctgacagacccctcgaagcggtgtcccctgaagaccttgcaaaagtgtgagatcgccctggagaaactcaagaatgacatggcggtgcccactcccccaccgcccccggtgccaccgaccaaacagcagtacctatgccagccgctcctggatgccgtcctgg

SEQ ID NO: 2129 - DNA, 137 bp, Homo sapiens
aaatatttttaactgagattttattatgttaacatttgtttctcattccacatcatcttcagccaagctctgagcacttagaattctctaattgttgggagcttagtcaaaagcatctggaacactagtggtggaag

SEQ ID NO: 2130 - DNA, 380 bp, Homo sapiens
ccaggtgaacctgggagtgagtccatacacaacacacacactcatagctcccttccctccaccacacacacacacaaactaatgactaacaacctaagaagggaaaaatgaatggggaatgggccacagggggctctggcctcagtccatgaggtgtgtccgtccgctatgccgaggatccagtgcacagagggtcagaacatgagttaggagggccggtccactccgaatcggagggtgaactcttcggcattctttctgaacagctccggattctgtgtcagcaggtcagcgaggtccatccgcaggggctccctgatattcggtctattcaccagcacattgagggcctccaggacttggcaagtcttggtgcaagg

SEQ ID NO: 2131 - DNA, 347 bp, Homo sapiens
ctgctcaaaggctgaggcaggaggatccttgagcccagggggcagaggctgcagtggccgagatcacaccactgcactccagcctggatgaaagagaaagaccccatctcaaaaaaagaatgagcagggaaatcctcaccaaggtgacaagtgagcaaagatctgaaggtgaggggatccctgggatccctggggaaagagcagtccaggtacaggaaacagcaagtcctgagggagaagcatgtttgaagaccaagaaagaggacatgctgtaagctatctgaagccacagtatacaatcagcgatggccacctccttggagcacttaacacccagaccgacgtgg

SEQ ID NO: 2132 - DNA, 344 bp, Homo sapiens
aaagaatcagcaaaatttcaaataaaaaattatgaaaatattatcctcattagttcatttagtcccatgaaattaattattttctctgcttgatcttggtggacagtttcatgaagctgtcagttagttcattaaagttttggaaattctcagacagtgcagtggtatcagaaacttgtattcaagagtacaggtcagagtcttcttttcttttctttttgagatggagtcttgctctgttgccagactggagtgcagtggtgcgatctgggctcactgcaatctccacctcccgggttcaagcgattctcctgcctcagcctcccgagtaactgggactacag

SEQ ID NO: 2133 - DNA, 214 bp, Homo sapiens
gtggtgcggaagcagatttagggaggggagggcctacttaggggctggaaggggatggggctgcctcctggagtgtggtggtcacagagtgttggctttgtgggagggaaaggaaagggaggcacacaagaagtcaggaagagtggatgggcggtgcttcctgggcactgaacatgtgcactgcccagggcacgagggccaggactaggcatgg

SEQ ID NO: 2134 - DNA, 452 bp, Homo sapiens
cctagagagctagagaagcaagtaagggccagggccagagtcggcttcaatggaacaacagcccagtgccctaaggcccctaactcttgctggctgtttcttgaccccaagccagggttgggagtcctctgggcatccattttttctaaaggaactggacagagtacacacaggaaaggaagctgtcaccctcttgccatctggctccaggggcctccagtccagcattcctccttcttcccttgattgggtggggccacatgatgggcagccaggctctgggctgtcccactagagcaggctgcaaacacagccatgtttcagtgaggcgttgatcttcttccctggtgtcccaacctaccagtgccacgttacagcccagagtgagttctacaagcgttgctggcctaatggatgggctgggggaagggggtgggacaggggctggagga

SEQ ID NO: 2135 - DNA, 313 bp, Homo sapiens
ctgcacatcgagagcaagttctacaagatgatgcagggtggcgtggggatcccgtccatcaagtggtgcggagctgagggcgactacaacgtgatggtcatggagctgctggggcctagcctcgaggacctgttcaacttctgttcccgcaaattcagcctcaagacggtgctgctcttggccgaccagatgatcagccgcatcgagtatatccactccaagaacttcatccaccgggacgtcaagcccgacaacttcctcatggggctggggaagaagggcaacctggtctacatcatcgacttcggcctgg

SEQ ID NO: 2136 - DNA, 423 bp, Homo sapiens
aaaatgattgctatttttatgtctgcatcaaaaactaatacaaaaaataatttgactaaagtgaaaatttcaaataagtccacytggcagatgaaaataaagcaaaaaattacaatagattcctcatcttctacagtagttggtttcaaacgtgtacaaagtaaactctatacgatgagaagatgaaatcatcttagaagttagtttttaagatcagtcttaaagatatttcagaacatactagaatatgatctaattattctttcagttgtttacagaaaaatgaaaccacagaattattcctgttacctgggttgaagatcctaatagctaggtgtaaatttggataaggtacagtaattcgaaataagtagtgcatgaagttttaatgtctggtttctctataaagcataaatagatttt

SEQ ID NO: 2137 - DNA, 547 bp, Homo sapiens
  misc_feature 411: n = A,T,C or G
aaaaatttatacaactagatttattcgctatatatataaactagtgttggaattaggggaaaaagtaccaaatacatctacacaaatactagaatcatattcagaattgcaaaaaggcataataatctgtttaccatataactagctgtttgtaaaatctgtaatggttaataaaaaatccttacgaatatagtactaatatgtagtaaattacaccaattaaataagcagctcaaattcataaggctaaagacccaatatccctgaatttctaagtgttcatctcagctttaacatggtttcatctaattgttacctcatcagaagagacatttttaataactcctccatccttaatacatcatcatactttcagaagtggagagggaacaatttccctaccacttttkntccattctcataaatcagtgttattacaaaatctaggctagcacaggtgccttaaaggatacaatggactgaagtaaacagaatttcaaggtccaggatattgttggtgttgtacaatttgtctgtctgccagaaa

SEQ ID NO: 2138 - DNA, 132 bp, Homo sapiens
aaatgcattttatttttagacaacctacatgacacgtttttcttaaaaacaatgcctccactccaaataaatcacagtcaaaataaatgaagagctcaagatgacatcagtcccatttgtcttaagtcctgg

SEQ ID NO: 2139 - DNA, 246 bp, Homo sapiens
cctagataggggattgtgcggtgtgtgatgctagggtagaatccgagtatgttggagaaataaaatgtgcatagtggggattttattttaagtttgttggttaggtagttgaggtctagggctgttagaagtcctaggaaagtgacagcgagggctgtgagttttaggtagagggggattgttgtttggaagggggatgcgggggaaatgttgttagtaatgagaaatcctgcgaataggcttccg

SEQ ID NO: 2140 - DNA, 537 bp, Homo sapiens
aaaccaatgcacccacttggagttataatttccccataaaaactttccatgctgatcactttttttcctttaatacgctttgagcatcagggcacactgctccatccatcgcaggcgctgcgggtggagtttctatctcagtgcacagcatgaaagcttgggtccatctgtgccacacaaaaccaagcctctcttgaagtgatttgtttacagtgtcatttgatggagtggagtgttctgcaactcattcgaactgttacagaagctttgctaaaaggtcaccactgctctctagaatttccaaatctgggcaccctctgggagcttgttaaagataaggttctccatgggctttttccatacaaactagatcagattaacaagaggctacttttccatagaggtttgtgttcatgttgagaaggagagcaagaaagagagaacacaagtaaattacagttagttacctcaaagtgtgcaagcccactttctcccaattcagagggcatgtaacaagtgatagtacaatttaatagg

SEQ ID NO: 2141 - DNA, 596 bp, Homo sapiens
atcctctaaaagaagttcattatcacacaaggtaactggatttttgaaatgctgtatctactttcttatgtcttgtttctcctttcatgtaatttttgttctgtatggagcaccactgatagagttggcattggaaacatttttatttgcagttattttgtctacttttactactgtgccttgcttatgtttgttaggaccaaacctcaaagcatggctaagagtgttcagtagaaatggagttacatccatatgggagaatagtctccagatcactacaatttctagctttgtaggagcatggcttggagcacttcctattccactggattgggaaagaccatggcaggtatggcccatctcctgtacgcttggagcgacctttggctacgtggctggccttgttatttcaccactctggatatactggaatagaaagcaacttacatacaagaacaattaactggagcaaagggagatatttctttgtgcagattctgtaagggctgggcagaaatgtgtatggtcaaagccaagcagttccatttacagctctgtttttacgtagttacaacatgatgtgattgtagcttttt

SEQ ID NO: 2142 - DNA, 216 bp, Homo sapiens
ccaaaacaggctcaggccaaagacctcccaagctgtatgtacttccagtatcctgaaacagtgtttggtgacataatgccaagggtaaacaagcctgatttaggcactgctttatccaggggcttcacccatgaaattaataaaacttatctgagtcacttgaaacttggttcccagaaaacacatttctggtttataatctccttttatgctcac

SEQ ID NO: 2143 - DNA, 308 bp, Homo sapiens
ccttcctgggcaaggaggactccaagaccttcgaccagctcaccccggacgagagcaaggagaggctagggaagattgttgatcgaatcgacaatgatggggatggctttgtcactactgaggagctgaaaacctggatcaaacgggtgcagaaaagatacatctttgataatgtcgccaaagtctggaaggattatgatagggacaaggatgataaaatttcctgggaagaatacaaacaagccacctatggttactacctaggaaaccccgcagagtttcatgattcttcagatcatcacaccttt

SEQ ID NO: 2144 - DNA, 296 bp, Homo sapiens
aaaacgaagacgatctaaagtccaagaccaaggaaaattgataaaaactctaatacagactaagtcgggatcattgccgagcctgcatgacataatcaaaggaaacaaagagatcaccgtgggaacatttggtgttacagcagtctcgggacatatctaaaattaattgaacttttcatacagaagacctttttgttgttgttctttgaagaacagtctgtagtatttgaagggtttgggggagggagaaaatattaatgggaaaggcattcagaaattatggtttctaccttttt

SEQ ID NO: 2145 - DNA, 57 bp, Homo sapiens
aaagtggcttcaggaaggcatggaagaggactgagtggggaaagctttttgtgcatg

SEQ ID NO: 2146 - DNA, 248 bp, Homo sapiens
aaaatgattaatgttgagttctcaactagctctgcagaactagaggagctgtttgcatctgtctgtgcggatggagtttcttttatctgacaccaggtctccaaccacactgaaacaaggcatttatctacagagctcaactagaaccccttttcattaggctactccacttccttcccctcatacctaccccacatcagccacgtggttaagaaggatagtcaggaatgtttttaccaactccaagc

SEQ ID NO: 2147 - DNA, 169 bp, Homo sapiens
cgcggggcggacgggagcgagtatgtccgctctgactcggctggcgtctttcgctcgcgttggaggccgccttttcagaagcggctgcgcacggactgctggagatggtggagtccgtcatgccggtggtggtgtgcacattgagccccggtatagacagttcccccag

SEQ ID NO: 2148 - DNA, 275 bp, Homo sapiens; identical to SEQ ID NO: 1898

SEQ ID NO: 2149 - DNA, 201 bp, Homo sapiens
aaagtcatttttgaagttgggaagtctcatgagagatgttgaagtatgtatttaatcaagagtcatgatttcaaactagttttacatattaagcagttagtgttctaatttaatgggtaaatgtgtgtttggataaatatctgaaaattttatccttaagtatatataattatttgcctcttatatgtcttaaagctattt

SEQ ID NO: 2150 - DNA, 180 bp, Homo sapiens
ctgccacctgatgccaatatacagagcgtcaaaatcaatatggaatatgtgaagagccaaaaactaggcacagaaaaggmaggagaaggcattaggggaaaacgacaagagacagtcctgtggtgaaaaccacactgacggggacttaggagactcggtctcggctttgccactacacag

SEQ ID NO: 2151 - DNA, 55 bp, Homo sapiens
ctgcctctgccaattcagtttattttttggggggagtggtgtgggtgggagagtt

SEQ ID NO: 2152 - DNA, 317 bp, Homo sapiens
cctccccagctatgagtaactgtgagtcaatttaacctttttgctttataaattacccagtcttgggaagatttttattgcagtgtgagaatggactattatagtaaattcgtgctggtagagttgggtactgctgtaaagatacccagcaatgtaaaagcgactttgggtctggagatggagatgagaaacctattgggaactagagcaaaggtcactcttgctatgcttaagcagagactggcagcattttcccccctgccctaaagagctgtggaactttgaacttagattatctgaaattgaaacttatgttt

SEQ ID NO: 2153 - DNA, 380 bp, Homo sapiens
ggagaacacgctgcttcacctcttcgccggcgggtgtggaggcacagttggtgctattttcacttgtccactagaagtcattaagacacggttgcagtcttcaagattagctctccggacagtctactatcctcaggttcatctggggaccattagtggagctggaatggtgagaccaacatccgtgacacctggactctttcaggttctgaagtcgatcctggagaaagagggaccaaagtcactttttagaggcttgggtccaaatttggttggagttgcaccatcaagggctgtatactttgcatgttactccaaagccaaagagcaatttaatggcattttcgtgcctaacagcaatattgtgcatattttctcag

SEQ ID NO: 2154 - DNA, 420 bp, Homo sapiens
ctgtagcctctgcaagtgaaaatccaggccgacttgcagtcattggactgatgtccaagtgcaatcaccatacagcagctacaggcagggctggctgatagggagtatgggagaaggacacgctcagatgaaaacatgcatgcaacgattttcaccactgaacacactgttttctgtgatagaaactgtcggccctgctgggggacaagatattcacggcctcactagccagtgtgatgccaccagggcagcctgcccctgatgctcctttgttacctgctaaagaaggaccataaggtaaaaggcaccttaccttatggagtgagcccagaccccagggaaaagcttgggtagaacaatccaaggggcagcctgggtgtgagaatccagcccaagctagctgctctagaagcctggagg

SEQ ID NO: 2155 - DNA, 220 bp, Homo sapiens
ttggagtatgtagcatttagcaccactggctcaatgcgctcacctaggtgagagtgtgaccaaatcttaaagcattagtgctattatcagttaccaccatttggggcttttatccttcatgggttatgatgttctcctgatgacacatttctctgagttttgtaattccagccaaagagagaccattcactatttgatggctggctgcatgcagacattt

SEQ ID NO: 2156 - DNA, 246 bp, Homo sapiens
aaatatttgtgactctttcctaaagccaaagtttctgttgaattatgttttgacacacccctaagtacaaggtggtatggttgtatacacatgctgccttcttggggattcaaaaacaggtttttgattttgaatagcaattagtgatatagtgctgtttaagctactaacgataaaaggtaataacattttatacaatttccatatagtctattcattaagtaatctttttacagttgcatcagg

SEQ ID NO: 2157 - DNA, 183 bp, Homo sapiens
ccttcaacttatggcagatcaacctccatgagctcatcctgcgtgtgaaggggttgaagctggctgaccgggtcttggccctaatatgctggctgttccctgctccactctgagtggaattgctctccctgccccattctggtgtctttccactcctcagcccctcatcttgcctccacccag

SEQ ID NO: 2158 - DNA, 511 bp, Homo sapiens
  misc_feature 397, 501, 504: n = A,T,C or G
aaattaagatttagcaaaatcaactataatgtatttacttctactcattgatgaatgacagaaatcagttaaagttttacatacaaaagatataaatactgcataatacgtagtgaatattggcacaaaccctttcgtacttaaagcataaaatgcaatcagtaaatctgatgctcttaagtgtgtttcttaagatgacatcaaaaacctctagatagcatggaaatttcccggtttaaggctttccaataggtttgtagcaagcatcaggttgccagaggcgaatatcaacaagaacttgattgagtttttgcatccagagatcccgctcttctttagtatctgcagacagccagttcttgataacacagagtgtgtccctgcattggctgacaangagtctctcggtcatcttctctttgtggtcggacagtaattaattcaaaagtgttgcgtcttgcacaaaattctctgttggctggttctatctgacgactggtncanttagcca

SEQ ID NO: 2159 - DNA, 481 bp, Homo sapiens
  misc_feature 425, 429, 467: n = A,T,C or G
ccaacatggtgtaaccccgtccctactgaaaatacaaaatattagctgggcgtggtggcatgtgcctgcaatctcagctactggggaggctgagacaggagaactgcttgaacctgggaggtggaggttgcagtgagccgtgatcccaccactgcactccagtctgggcgacacagcgagactccaactcaaaaaaaccccaaaaagacaggcagggtcagaagtgtgagtcctggattccaaggtggcaggtgtaatcagggagctaagaattcattatttttctcattcttggtccagttacctacagaaatggctcctgtaattacaagaccaggaggtagggccaggccctggggagaggagaaggggctggcagtgcaggagtgagagtcccagggaatggcccactccctgttagggtngggnagttgagacaggtgcaggcgcaggatctcctctgcccncttcaggtactcag

SEQ ID NO: 2160 - DNA, 463 bp, Homo sapiens
  misc_feature 410: n = A,T,C or G
aaacttctgcaagcatcatttaagcgaatgaacgttgataaggtaattccagtggagaagctagtgaaaggacgtttccaggacaacctggattttattcaatggtttaagaaattctatgatgctaactacgatgggaaggagtatgatcctgtagaggcacgacaagggcaagatgcaattcctcctcctgaccctggtgaacagatcttcaacctgccaaaaaagtctcaccatgcaaactcccccacagcaggtgcagctaaatcaagtccagcagctaaaccaggatccacaccttctcgaccctcatcagccaaaagggcttcttccagtggctcagcatccaaatccgataaagatttagaaacgcaggtcatacagcttaatgaacaggtacattcattavnacyktgcmcttgaaggcgtggaaaaggaaagggatttctactttgggaagttg

SEQ ID NO: 2161 - DNA, 475 bp, Homo sapiens
aaaagtatttttactggttttataccaatattatatgcagaaatcacaggatgaatttagaattaaatctcaattagttcactttggcctagatttatgaaaaatgcatgcctcgtaaagagtccactgtattcacgagtaaagttgcttttagtgttcacttgatgacttggagagtaggaattttgcaaaatctgaatttaaggaaattctttaggataaccatttcaaaaaataaaattgctatgcaatcttgaatattttctcttttgcctcgtaaaatgaaaatgcattcacagtttctgtaaattatttagcagccttaaagtttatcaaaaaattgtccagattccacgtgcagcatgcttggccctgcatttaatttaagaaggattaataataatgctctgaatttttcgaaggggattctcctaaacccacccacttctcttgcccaggctgctttttacctgcc

SEQ ID NO: 2162 - DNA, 330 bp, Homo sapiens
ctggaatggtagcagtggtgttggcagtagctataaaaagaacttgagaaaggtcaaaggccacatttagataatgatctgtgaagttatggttttgttcaggatccaacacctcaagcagagctgctgctggatcaccctgtagactttttcccagtttgtcaacctcatctaataggaacactgggttgttcactcccacagtcttcaagccgttgatgatgcgaccaggcatgctgccaacataggtgcgcctgtgtcctcgaatgtcagactgatcacatactcctccaagtgcaatcctgtggaactctcgacctagagtcttgg

SEQ ID NO: 2163 - DNA, 200 bp, Homo sapiens
ctgctgctgggtggtctgctgctgctgctgcatgaccttggggatggcggcggacggctcctgagccttcccttccttgaactcgctgaccttgtggcggtagtaggcatggtaagggtcattggggttcagaaagttgaacttggggttgttgatctcgttctgtcggatcctagcttcaaattcaggcccgtttctgg

SEQ ID NO: 2164 - DNA, 342 bp, Homo sapiens
aaartgttgcasgcccttttmaagttttgmctmcctmactctctgcaaactcccttaatgtgggccatgaawgasaattttaagagacawtaacwgaaagactggatattaccccagagaataaakacttgcaaagcctgkaacttataatgtttgaaacctgrtstctmsaacttgagctatcccggttgwcagtcccacarwggccgwgcacaatgttggcctggactgaaaagggcctmtggctcctccgatttcagttcttagcaatatcagacctgtgtttctttggaacagaagttactaaaacaacctaattccaaagaagcccttttgatccak

SEQ ID NO: 2165 - DNA, 358 bp, Homo sapiens
aaaatattaagaatggattaaattttaatattcagaataatctgttcaaacctgagtgtattaagactaagtgtacttgacaattgaatgaattaagcctaaaaacatttctctaagaaaccagtggtccatttaaccatttgatgaaacattattttaatgacttataaaggatagtacagtatactgaaattccacttaaatactgaaatattctactaaatgacattgttttgtctaaatttcctccagaaaaatctgttagcatttcttaaaagtccctcagatttgagggaaattctaaattaggacagttttctctccaaataaatataaatgatcttgagtatttttgttt

SEQ ID NO: 2166 - DNA, 358 bp, Homo sapiens
aaaaggagaaattgaaataagaatgggtcaaatattgaccaatgaactcgataaacatcaactaatgtagccacatggcacaaaattaagagagtacaaaacaaaacctttcaaggtgggggtggggggcaaattaagaaaagtgaaacaaaaccataaacaaagcagcggggttcacgacgctaaagctattctaaagacttggtgacgagcgacagcggctggggctgggtcccggccagggagctgtgggaatgtaaggaagaagtcgacggctgtgcaattgatgaggagggggcggcaggctgcaaagcggctgggggcaggtccagggccccgttgggacagagggcggagg

SEQ ID NO: 2167 - DNA, 223 bp, Homo sapiens
aaaatttctaatgtatccaagatgtgcaatgttgttaggatctcattcttcagtgcatgaaaagctactaccctcagaacattttgtgttaattgtacctgcaagaacacctcaggcaagccaagaagaaatgaaacccaaataaaacttgaaaatgcaccttaaaaatatatatacatataatagttttgaaatgggattctgctttattttgatggaatgg

SEQ ID NO: 2168 - DNA, 212 bp, Homo sapiens
aaacaacgagatttttcagtgtgcttctaaaacaaagtaaagggatcagaaaatgtggttcaagtcaagtgtgcaaagctctcgaagaaaggtcctgcagcctggacaggagtacaaatattctcttatacaagttaaatgtactcttttcctccacaacatttttgaaatgaaacagcaaatgcatttatactcacaaatcagtcaaaagg

SEQ ID NO: 2169 - DNA, 215 bp, Homo sapiens
ccaagggtcatgatggcaggagtaatcagaggtgttcttgtgttgtgataagggtggagaggttaaaggagccacttattagtaatgttgatagtagaatgatggctagggtgacttcatatgagattgtttgggctactgctcgcagtgcgccgatcagggcgtagtttgagtttgatgctcaccctgatcagaggattgagtaaacggctagg

SEQ ID NO: 2170 - DNA, 386 bp, Homo sapiens
ctgagtattggagccaggagcctgccatgaggttttgagaacagagtgctgttttagagctggcagcagcatctcagcccaagagaaggttatattcccagaggatgtcagtcccaaggaccagtagctgccatcagtttggattctgaaaactaactggcatcaacactgggtgtagaaacatgcttgccttatgtatcagaggacatgctcagcagatccaagagatatatttggcaactttttctagaaaaggcacattgggtatcattcattacatttttgagtttttttgggtttttttttttttgagacagtcttgctgtattgcccaggctggagtgtggtggcacaatcacagctcattgcatcctcaatcacccagg

SEQ ID NO: 2171 - DNA, 227 bp, Homo sapiens
aaaaaatcaaccaaccaatgagcacattcaacgtgattatgagataacaggagtttcaacataagagctgaagaggaagaaggatgaggatgctgcttaagaagtaaaggggcaggtggaacagaaatgagtgggcagaagaggtacaaataagcagcactgggaatggggaggtaatagggctttmggtaaaagtttctccttggtccccctaccctccttccagg

SEQ ID NO: 2172 - DNA, 56 bp, Homo sapiens
ctggttccagaaggaccctctgaggctggtcttccgggtaggatgtgctgtgggag

SEQ ID NO: 2173 - DNA, 387 bp, Homo sapiens
ctgacttcttacgttggaagtgttcgtccgcttgtcactgaattggaccctgatgctcccataagacagaaaatgccccttgatgatctggatagagaagatgaagttagattactcaaatatctctttactctaatccgtgctggaatgacagaagaggcacaacgactctgtaaacgctgtggtcaagcatggagagctgcaacacttgaaggctggaaactgtaccatgaccctaatgttaatggaggaacagaattagaacctgttgaagggaatccatatagacgcatttggaaaataagttgctggagaatggcagaagatgagctttttaatagatacgagagagcaatttatgcagctttaagtgggaatcttaagcag

SEQ ID NO: 2174 - DNA, 146 bp, Homo sapiens
gcaaaacccaacatattttttttactgtcagttgcggtttatttattctttaactgtctgttttagtagtttaatgattatgaaaaatgtatctgtgtgtgatttgctatttattaaattttaagtactttgctgaatgtcatttt

SEQ ID NO: 2175 - DNA, 161 bp, Homo sapiens
cctcgtagaagggcttggggtccaccttgctgtggcagatgctgaacacgctgcttttgaggatgctgcactgcttctcggcccaggagcggcggtgcgggttcaggctgcagggctcggggttggtgctcacatctgggcaggtgggggcctccttccag

SEQ ID NO: 2176 - DNA, 200 bp, Homo sapiens
ccattaaagccaacatagtgcacttgatgcttagcagcccagagcaaattcagaagcagttaagtgatgcaattagcattattggcagagaagattttccacagaaatggcctgacttgctgacagaaatggtgaatcgctttcagagtggagatttccatgttattaatggagtcctccgtacagcacattcattattt

SEQ ID NO: 2177 - DNA, 192 bp, Homo sapiens
ccagcctggagctgcaggatgatgaggacgagggctacttccaggagctgctgggctctgtcaacagcttgctgaaggagctgagatgaggccccacaccaggactggactgggatgccgctagtgaggctgaggggtgccagcgtgggtgggcttctcaggcaggaggacatcttggcagtgctggcttgg

SEQ ID NO: 2178 - DNA, 170 bp, Homo sapiens
cctggatgtggctcttcgcactgaaggccaagtagtagatcacaaggccgatcgccgcagccagcacctcagtggacacccagggcccgttccaagtgccccgatggtccacgctgactgtaaacagaggcgggatgatggaaatgtcctcgttattcctctgagccttc

SEQ ID NO: 2179 - DNA, 227 bp, Homo sapiens
aaagttagggaaaaaaatatttggaggaccagagaagacatcagttttgtctttcagaagctgggaaccaagacggtggaacagaatatgtagtaaaaggatagcttagtgcaggggcagagaaactgactgaggacagactctttggtgggagagaaggaagggaaaggatcagcattatccactgggaaaactgacctcagctaagccagatcaccagcagtagg

SEQ ID NO: 2180 - DNA, 248 bp, Homo sapiens
ccatggctaggtttatagatagttgggtggttggtgtaaatgagtgaggcaggagtccgaggaggttagttgtggcaataaaaatgattaaggatactagtataagagatcaggttcgtcctttagtgttgtgtatggttatcatttgttttgaggttagtttgattagtcattgttgggtggtgattagtcggttgttgatgagatatttggaggtggggatcaatagagggggaaatagaatgatc

SEQ ID NO: 2181 - DNA, 238 bp, Homo sapiens
ccaaacttgcatttgcattttgcactcatgacgatgatgatgcccatggcgcacagaaccccascgcakatgagcccgccaacctggaggctgtgccagtcatagtagaaaggactgtttttatcttctaggtcattggcgtscaggacaggaaagcctgccmggaacrcaagcaggcccagggtcaccttctgcatgtcagagcgctggcctgtgtggwtcaccaggctgagcasag

SEQ ID NO: 2182 - DNA, 333 bp, Homo sapiens
ctgcagaggccacctggattgcgcctaatgtgtttgagcatcacttaggagaagtcttctatttatttatttatttatttatttgtttgttttagaagattctatgttaatattttatgtgtaaaataaggttatgattgaatctacttgcacactctcccattatatttattgtttattttaggtcaaacccaagttagttcaatcctgattcatatttaatttgaagatagaaggtttgcagatattctctagtcatttgttaatatttcttcgtgatgacatatcacatgtcagccactgtgatagaggctgaggaatccaagaaaatgg

SEQ ID NO: 2183 - DNA, 447 bp, Homo sapiens
cttttttttttttttttttttttttttttaraagcttgaaratgcttttattgaraaggaragggactgaacarattyttgacaagcctaggcataaatgctccaggtttgggaaagaggtaaaataaataggtggttactggggaggctccaacacagccaraagggacactgtttgcttcarcctytgggcctgtccattgtttttgctgtgtgaasctggggtgtggggtttgctgcaaactgggatccaraaaaggaattctcggggctctaatgggtatcaratctgccatcttgcatcarcggggcctggttcttggaggtgtctaarctggtgcctaagggcttatccccagcatccttytgacagcctccarccgggacaggattcgtggggcctcctgtggacatagcatytgtagctccccaggtcttatgcraagt

SEQ ID NO: 2184 - DNA, 222 bp, Homo sapiens
aaagtagtcttccgtggttgggaagcctcacctcccaagaccagagtcagttggagctggttgttgttggaagggagtgggttggggaactggggtgggggcagggagatccccccgctctgctggaggtcctaggtggagaagaactgcacttcacaaattctggggtttggtgggaaggggatgaggcaggagcagcaagctggggagatgggacccacc

SEQ ID NO: 2185 - DNA, 229 bp, Homo sapiens
cggctcccagaggtattcccagacaggcaactatgaactagctgtggccctctcccgctgggtgttcaaggaggagggtgtcctccgtgtggggcctgtgtcccatcatcgggtgggcgagacagccccacccaatgcctacactgtcactgacctagtggagtatagcatcgtgatccagcagctctcaaatggcaaatgggtcccccttgatggcgatgacattcag

SEQ ID NO: 2186 - DNA, 260 bp, Homo sapiens
accaggtgttgcttgttcagtatctcaagcccagaaagatgaattaatccttgaaggaaatgacattgagcttgtttcaaattcagcggctttgattcagcaagccacaacagttaaaaacaaggatatcaggaaatttttggatggtatctatgtctctgaaaaaggaactgttcagcaggctgatgaataagatctaagagttacctggctacagaaagaagatgccagatgacacttaagacctacttgtgatattt

SEQ ID NO: 2187 - DNA, 230 bp, Homo sapiens
ctgacatgtctccctgatgcagggcaggcgagccccaaattggggcttagcctgggagggttcttggcttcattcagggaataattcaagggcaagcggtgatagaagaaagcagctttctagaggtggcagtgtcacagccctgtgactgctcctgcagagcagggctaccccagtgtgctgagagctgcagctcagtagcttccacactcatatttgcacccactttt

SEQ ID NO: 2188 - DNA, 196 bp, Homo sapiens
ctgatgtgtcctgtacacagtgggaagattttagttcacacttagtctaactcccccattttacagatttctcactatatatatttctcgaaggggctatgcatattcaatgtattgagaaccaaagcaaccacaaatgcataaatgcataatttatggtcwtcaaccaaggccacataataacccagttaactta

SEQ ID NO: 2189 - DNA, 300 bp, Homo sapiens
aaagacaagctacagactgggagaaaatgctgcaaaacacatatctgacaacatatttgtatccataatatgtagattcttaaacccaatggtaatataacaatccaattttaagatgaacaaaagatttgaagactcttcaccaaagacatacagatgacagaaatgcacatgaaaagatgttcaccatcagccattagggaaattcaaattaaagccatgattagatatcagtacacacctatcagaatggctaaaataagaaacagacaataccaagtgctgataatatgcagacca

SEQ ID NO: 2190 - DNA, 146 bp, Homo sapiens
ctttgatgccatttctaagacctacagctacctgacccccgacctctggaaggagactgtattcaccaagtctccctatcaggagttcactgaccacctcgtcaagacccacaccagagtctccgtgcagcggactcaggctccag

SEQ ID NO: 2191 - DNA, 288 bp, Homo sapiens
ccaatgggatcctcaaggtgcctgccatcaatgtcaatgactccgtcaccaagagcaagtttgacaacctctatggctgccgggagtccctcataratggcatcaagcgggccacagatgtgatgattgccggcaaggtagcggtggtagcaggctatggtgatgtgggcaaggactgtgcccaggccctgcggggtttcggagcccgcgtcatcatcaccgagattgaccccatcaacgcactgcaggctgccatggagggctatgaggtgaccaccatggatgagg

SEQ ID NO: 2192 - DNA, 284 bp, Homo sapiens
ctgctgctccggcacctcgcccgtcagcatcaggaccacaattttcaggtcccgtgggtttggggcactttcaaagacattctctatggtgtattcaatggcactgcctaaggccctggttccctgcaactgtgtcattcccctgctgaggaagtccaccagcttctccttggagccatagtcagtcagggagaattccaccttcacaggtggcatgctggcattgtccacggactcagagggcgcgtgctgcacaactgccactctggcgaagtgctgggagg

SEQ ID NO: 2193 - DNA, 479 bp, Homo sapiens
cctacagacttatttcttcttggacacacccacggtgcggccacggcggccagtggtcttggtgtgctggcctcggacacgaaggccccagaagtgacgcagccctctatgggcccgaatcttcttcagtcgctccaggtcttcacggagcttgttgtccagaccattggctaggacctggctgtattttccatcctttacatccttctgtctgttcaagaaccagtctgggatcttgtactggcgtggattctgcataatggtgatcacacgttccacctcatcctcagtgagttctcccgccctcttggtgaggtcaatgtctgctttcctcaacaccacatgagcatatcttcggcccacacccttaatggcagtgatggcaaaggctattttccgccgcccatcgatgttggtgttgagtactcgcaaaatatgctggaacttttcagggatcactagagacatggctgcagcac

SEQ ID NO: 2194 - DNA, 219 bp, Homo sapiens
ggatcccagcactggccttctcatccgggccaaccagggccattccctgcaggtcggggtgaggggacaagtgcgagacgagatgggagggacccctgcctgcgaagggggtctcactgctacccgttcaaccaggtacctaagttggagctgatgcccctggagacaccgcaggccctgcccccgatgctagtccatggtacattctggaagcactgg

SEQ ID NO: 2195 - DNA, 75 bp, Homo sapiens
cctagctccaaccaagagtgtgctccagatgtgtttgggccctacctggcacagagtcctgctcctgggaaaggg

SEQ ID NO: 2196 - DNA, 161 bp, Homo sapiens; identical to SEQ ID NO: 1852

SEQ ID NO: 2197 - DNA, 175 bp, Homo sapiens
cctttagtgatgatgattaaaggtggtggctgtggccttgaaaacagtcatgtgaaaactcatcaccttaaggtgttaagtgtaaggatcttcatgatgaaatttctgtaaatggtgcagtcagcctcagtttccaaagccggaaaaggatcctctagtagccacggtgtggcag

SEQ ID NO: 2198 - DNA, 147 bp, Homo sapiens
ctggagcctgagtccgctgcacggagactctggtgtgggtcttgacgaggtggtcagtgaactcctgatagggagacttggtgaatacagtctccttccagaggtcgggggtcaggtagctgtaggccttagaaatggcatcaaagg

SEQ ID NO: 2199 - DNA, 228 bp, Homo sapiens
gtggatgcccgtcaccaagttgggccgcttggtcaaggacatgaagatcaagtccctggaggagatctatctcttctccctgcccattaaggaatcagagatcattgatttcttcctgggggcctctctcaaggatgaggttttgaagattatgccagtgcagaagcagacccgtgccggccagcgcaccaggttcaaggcatttgttgctatcggggactacaatgg

SEQ ID NO: 2200 - DNA, 207 bp, Homo sapiens
ccaggccaagcaggatgacagcaaacgcattctgaacgtgtagcaatcaggtcccctgtaatgtgcttggagagtgtggacaagggccgagatgacgagctatgagctgtggaagggaatgggggaagcagaagggcacaaacagaagtactgaagggagaggccgggctctcaggaagcagcaggcacgtgccaggtggaagccag

SEQ ID NO: 2201 - DNA, 261 bp, Homo sapiens
agctgtcctgcacccccttgcagatgagtatcaccccatcttttctttccacttgttttttatttttattttttttgagacagagtctcactgtcacccaggctgaactgcagtggtgtgatctaggctcactgcaacctccacctcccaggttcaagcaattatcctgcctcaggctcccaagtagctgggattacaggcatgtgcaactcacccagctaattttgtatttttagtagagacagggtttcaccatgttgg

SEQ ID NO: 2202 - DNA, 228 bp, Homo sapiens; identical to SEQ ID NO: 2199

SEQ ID NO: 2203 - DNA, 504 bp, Homo sapiens
ctgaagatctccagagtcgtttggaatcttacgttaaagaagtttttggttcatctcttcctagtaattggcaagacatctccctggaagatagtcgtctaaagttcaatcttctggctcatttagctgatgacttgggtcatgtagtccctaactccagactccaccagatgtgcagggttagagatgttcttgatttctataatgtccctattcaagatagatctaaatttgatgaactcagtgccagtaatctgccccccaatttgaaaatcacttggagttactaagcaattcggaagagaaacacattgaaatcactgtctttccctgagcaagggggctgctcattagatcttttgatactttaccatgtgaaatactaccagaactgttctctaaacccactttttctgtagaggaatgtatcatctttttttttctcatattacaaatggacaaataacggactttctattttcatatttgctgaaaccatttttt

SEQ ID NO: 2204 - DNA, 69 bp, Homo sapiens
ctgcacaggtgactggatgggggaggggcaggtgaggtgggtctacagaggtggcttcrcctttgacct

SEQ ID NO: 2205 - DNA, 145 bp, Homo sapiens
aaaataggtgtataaaatgttttccatgagaaaccaagaaacttacactggtttgacagtggtcagttacatgtccccacagttccaatgtgcctgttcactcacctctcccttccccaacccttctctacttggctgctgtttt

SEQ ID NO: 2206 - DNA, 201 bp, Homo sapiens; identical to SEQ ID NO: 2149

SEQ ID NO: 2207 - DNA, 376 bp, Homo sapiens
ccagcttgacggtatccacccattcggggactttcagcttcccggactttttgaggaaggctgccagagctctgacgaactcctgctggttcacgtcttttacagacctgcccgggcggccgcccgggcaggtctggagatgtttggtctattaatgtttttagtattaaaagttttataaaacaagcatagggctataaaaaagtacccttttcgaagtactctggcccactaaaaatgaaagttttccttcaaaatgattaaaaaaaacaaaaattgtagtcctacttttctgccagcccagtctgtctcaggcatctgctcaggaagcacctcctccctgctgggtgccaccagagctgggtcctcagacccc

SEQ ID NO: 2208 - DNA, 295 bp, Homo sapiens
ctgacgaagctccacagcttcctgggtgatgatgtcttcctccgggaactcgccaaggtgaagcaggagaataagctgaagttttctcagttcctggagacggagtacaaagtgaagatcaacccatcctccatgtttgatgtccaggtgaagaggatacatgagtacaagcgacagctcttgaactgtctgcatgtgatcacgatgtacaaccgcattaagaaagaccctaagaagttattcgtgccaaggacagttatcattggtggtaaagctgccccaggatatcacatgg

SEQ ID NO: 2209 - DNA, 385 bp, Homo sapiens
ctgatgatggacagtgaaactggtcgatccaagggatatggatttattacattttctgactcagaatgtgccaaaaaggctttggaacaacttaatggatttgaactagcaggaagaccaatgaaagttggtcatgttactgaacgtactgatgcttcgagtgctagttcatttttggacagtgatgaactggaaaggactggaattgatttgggaacaactggtcgtcttcagttaatggcaagacttgcagagggtacaggtttgcagattccgccagcagcgcagcaagctctacagatgagtggctctttggcatttggtgctgtggcagatttgcaaacaagactttcccagcagactgaagcttcagctttagctgcag

SEQ ID NO: 2210 - DNA, 433 bp, Homo sapiens
ctgggtggctgtgcggaaagctcgaatgatgatctgggggtgtaaaccttcctccacatagggtttcacctgcttcagaaactctgcagccagcaaggtcactgaggtggtgccatcacccacctcagcatcttgggatttggcaatgtctaccaaagtctttgctgcaggatggacaacatcaagaagtttcagaattgtggccccatcattagaaattgttgctttgcctctgccatctacaataagcttgtccatgccacggggacccagggtagttcttacagcctcagcaatcacctggcaggcactgatgttactcacaagctgggggatgccttgggagctatcagtcccctctttcaataggataactggtgtgggcatcattttggaagcttattcagcggccctccactctcccctcttctcc

SEQ ID NO: 2211 - DNA, 389 bp, Homo sapiens
ccaccatttcccctctaaacacatcttacagatcaggggaaaatctgaacctctcctgccacgcagcctctaacccacctgcacagtactcttggtttgtcaatgggactttccagcaatccacccaagagctctttatccccaacatcactgtgaataatagtggatcctatacgtgccaagcccataactcagacactggcctcaataggaccacagtcacgacgatcacagtctatgagccacccaaacccttcatcaccagcaacaactccaaccccgtggaggatgaggatgctgtagccttaacctgtgaacctgagattcagaacacaacctacctgtggtgggtaaataatcagagcctcccggtcagtcccaggctgcag

SEQ ID NO: 2212 - DNA, 157 bp, Homo sapiens
ctacttacaagtagtccaccttccaggttatcaatggtaagttattttttataaagtggttacacactgagcagattgcctcaagtgtaagttatggaacaatactttagctttcagggaatttggtgtgtaaattcttctatagcagtgttctttt

SEQ ID NO: 2213 - DNA, 388 bp, Homo sapiens
ccaagcgctcagatcggcaaggggcaccagtcttgatctgcccagtgcacagccccacaaccaggtcagcgatgaaggtatcttcagtctcccccgaacgatgagacaccatgacgccccaaccattggcctgggccagcttgcacgcctgaagagactcggtcacggagccaatctggttgactttgagcaggaggcagttgcaggacttctcgttcacggccttggcgatcctctttgggttggtcactgtgagatcatcccccactacctggattcctgcactggctgtgaacttctgccaagctccccagtcatcctggtcaaagggatcttcgatagacaccactgggtagtccttgatgaaggacttgtacaggtcagccag

SEQ ID NO: 2214 - DNA, 311 bp, Homo sapiens
cctagatggcaaagcacatgggctttgtgactccactactgacttccaggctaaggaaggactgacttagtgagctgttccaagaccactgagctcatggttccctgtggctgggacctccatcatgaccggggcttgaagagggtactctgttcccgctgccacatttggagcagtatgacggctgcagcagaggccaaaaactaagtgatcagccccagagagtcgatgggggacactgacaaaccaatcacaaagttggtgccattagctcttagggaggagaggtggggcctgggcaaggacagcag

SEQ ID NO: 2215 - DNA, 271 bp, Homo sapiens
ccaaggtagtggtacagcagtttacaacaacaacatgtacgtcaacatgtacaacaccgggaatattgccagagttaacctgaccaccaacacgattgctgtgactcaaactctccctaatgctgcctataataaccgcttttcatatgctaatgttgcttggcaagatattgactttgctgtggatgagaatggattgtgggttatttattcaactgaagccagcactggtaacatggtgattagtaaactcaatgacaccacacttcag

SEQ ID NO: 2216 - DNA, 437 bp, Homo sapiens
ctgggcatggagttggtcccccagaggcccaaagaccagacgcagctcctcaagggcacaattgcagagggtggcgccatccatgtcacatcgtgagaagtcaatggcgcttgcgtcgtacttgttcttctccacttggtagctgatccagtccagaacctgcgtcttcgaccagaactggggctgttcccccaaccagctggccttctctgtaccctccaatgacatctgggggttgctcagggtcagtaccaagtcatcggccccaaaggtggcagcagggggaacagaggccagggtggagtcctccgagctgtacatcgcactgaagtagttgctaaaaatgttgctaatctcacaggttgcagccatgaggctaccggagtggcggagtccggctgtggcaggcaggccggcaggcgggagagaaatccagt

SEQ ID NO: 2217 - DNA, 198 bp, Homo sapiens
ccagcagcggaactacagacgtcacaaatcggaacagcccagccacaccaccaaacacccttaacctccgatcctcccacaatgaactgttgaacgctgaaataaaacacacagaaaccaagaacagcacacctcccaaatgcaggaaaaaatatgcactaactaacatccaggcggccatgggcctctcggatccag

SEQ ID NO: 2218 - DNA, 133 bp, Homo sapiens
cctatgaagcctccctttcagaaattaagaaaggccatgaaatagaaaagaaatcgcttgaagatttactttctgagaagcaggaatcgctagagaagcaaatcaatgatctgaagagtgaaaatgatgcttt

SEQ ID NO: 2219 - DNA, 456 bp, Homo sapiens
ctgggagatatcgatgcggttgcacagcaggtccgagatgacgtcctgtgcgtgagccaccgcgccctcagggtctcggtcgatgagcaggcggcgcagtgaggcagtgaccaggttggaaaaaccctaccccaatttacccagaagacatttcacaccaggctggggtagccttgaacacatttttgtggtttttgctttgaaagcagcaagcagacccaaccccattccataaaaagtcaaaaccaaaggcaacttccccttaaagcaagacaaacttagctaagctctgtcctaactactgagctgtttttgatctcccccaacccccggggtcaccccttctacactgcgagaagagcggagtattttgcaatgtcacctttcatacctgtggcacatagaatgcagagcaagttaacagtcacataacagttgtttttctttttacctgcc

SEQ ID NO: 2220 - DNA, 130 bp, Homo sapiens
ccacgatgggcatgaagtgcacgcgctgtgggggagacgacaaagtgaagaaggcccgtatagccatgggtggaggcataattttcatcgtggcaggtcttgccgccttggtagcttgctcctggtatgg

SEQ ID NO: 2221 - DNA, 170 bp, Homo sapiens
  misc_feature 68: n = A,T,C or G
gtggaaggaaatcccctgrgtggttttatcttttgttacccaktgagcactggttccgckcaaatacntggggaaaagcaaaaatacacaagcaagttaaaattaattttgcacatctgggaggttataaaagaaagcactaatagtagtcactgcccacactttactgg

SEQ ID NO: 2222 - DNA, 210 bp, Homo sapiens
ccacacaacactacaaatttctaatggaagaattccctttttgatccgcagcttaggtggtaagtaaataaaaaaacagctcagaaaaacagcaaaaatattaacatttaggagtctcaaaactttgtattggctgtgagtctgggggaaaaaaacataaatgtcatactaccaattaaactttcaagagtcatcagattatttagcttt

SEQ ID NO: 2223 - DNA, 173 bp, Homo sapiens
ctggaggtcagccagagtcttccggagggcaggctccacatcctcggggtggtgcttggtgttccacagcttggatgtcacaaacagctcctcccgaggcaccgccttgcctggtcccacgttctccttcagggcctccccaatctcaggctcattgccgtwgatagcagcac

SEQ ID NO: 2224 - DNA, 58 bp, Homo sapiens
ctcagtcaagctatggctgttytcaaagagaagattgaggaaaagaggggtgtgttca

SEQ ID NO: 2225 - DNA, 171 bp, Homo sapiens
ttgtcttttccctctgcctctggagcaaccctctctcctccagagcaacccctgtccctccttcctacctctctctagggctgcacccccagctcaccttagacctggcccttcctacctgttgcccctactgtcttgtcccatcccagtggtcaggagggagagtactgg

SEQ ID NO: 2226 - DNA, 235 bp, Homo sapiens
aaaaaaagacatttattcagcgtcacgatcagactgttacatttagcaatcaacagcatggggtgcaaaaaaaaaaatctacattaaaaccctttgttggaatgctttacactttccacagaacagaaactaaaataacctgttatacaattagtcacaaatacagtcctcgagttttttgcccatacacatgagtatttgtctaaaacatgtcttctttgtagcagctaggccc

SEQ ID NO: 2227 - DNA, 242 bp, Homo sapiens
atccaaaccaaatggctgttaggtagatttatttttatataagcatgtttattttgatcagatgttttaacttggatttgaaaaaatacatttatgagatgttttataagatgtgtaaatatagaactgtatttattactatagtaaaggttcagtaacattaaggaccatgataatgataataaaccttgtacagtggcatattctttgatttatattgtgtttctctgcccattttcttt

SEQ ID NO: 2228 - DNA, 387 bp, Homo sapiens
ctgagtattggagccaggagcctgccatgaggttttgagaacagagtgctgttttagagctggcagcagcatctcagcccaagagaaggttatattcccagaggatgtcagtcccaaggaccagtagctgccatcagtttggattctgaaaactaactggcatcaacactgggtgtagaaacatgcttgccttatgtatcagaggacatgctcagcagatccaagagatatatttggcaactttttctagaaaaggcacattgggtatcattcattacattcttgagtttttttgggttttttttttttttgagacagtcttgctgtattgcccaggctggagtgtggtggcacaatcacagctcattgcatcctcaatcacccagg

SEQ ID NO: 2229 - DNA, 392 bp, Homo sapiens
ctgcagtcgtgtgatattggtgtcatcaatgaccttgcggagcccatggatgtcgttctccacagactggcgcatggccagctctgtctcatacttgactctaaagtcatcagcagcaagacgggcattgtcaatctgcagaacgatgcgggcattgtccacagtatttgcgaagatctgagccctcaggtcctcgatgatcttgaagtaatggctccagtctctgacctggggtcccttcttctccaagtgctcccggattttgctctccagcctccggttctcggtctccaggctcctcactctgtccaggtaagaggccaggcggtcgttcaggctttgcatggtctccttctcgttctggatgcctcccattcctgccagacccccgg

SEQ ID NO: 2230 - DNA, 152 bp, Homo sapiens
ctccaaatactttgtgagcagcggttccatcgcagtgaacgccgactcttcggtgcagttgttggccgaagaggccgtgacgctggacatgttggacctgggggcagccaaggcaaacttggagaaggcccaggcggagctggtggggacag

SEQ ID NO: 2231 - DNA, 114 bp, Homo sapiens
ccacagaagtaggggggtcttccttaagctctgtgtcagagttccacctgatccttatggatgtgaatgacaaccctcccaggctagccaaggactacacgggcttgttcttct

SEQ ID NO: 2232 - DNA, 576 bp, Homo sapiens
cctccaccacctgtgcttccagcaaatcgagctccttccgctactgctccatctccagtgggggctgggactgctgcgccagctccatcacaaacgcctggctcagctcctcctccacaggcgcagggaccaccctatcccacctatccaggatatcctgggtaaggctgcaacattgtgtatcccaagttggctaatgttgtttctaggctctggctaacctgttaaaaacagggtcatcccttctccaaatggaggtgtcatgaatgaataagctacactgtcagcttatccagaaatgaaaataatgttatggtcacttacatgaatagggtagctatttcctaggcttttacctgcccgggcggccgcccgggcaggtcctcctggaaggtttctcaggatggacagcactcgtggtgctgagccaggcactaaatggactgctcatgtctgctgtcatgaagcatggcagcagcatcacacgcctctttgtggtgtcctgctcgctggtggtcaacgccgtgctctcagcagtcctgctacggctgcagctcacagccgccttcttcctgg

SEQ ID NO: 2233 - DNA, 124 bp, Homo sapiens
ctgttccagagaaccgccttgctgatcttcggaaaacaggagtttcaccatttctctgacttgcacgtccactctttcttgtacggcatccactgtctcacagccggtcttcacgtgtcgccag

SEQ ID NO: 2234 - DNA, 146 bp, Homo sapiens
ctgagggagcttaacttggctgtaagatgtggtcttggtgcagccaacacgtgggaacatgtgcctggtgctgagaaccttggaaatatgacaagatattgaggaagaacctcttctgtgacctgcagagaatcttttggaacagg

SEQ ID NO: 2235 - DNA, 243 bp, Homo sapiens
ccacagcagcccttcgtggggaccccagcacacacgagcccgggaagctccttgcatagccaggcacacgcctccttgctgcttggagctgcgcagcacagcacggctcagattgctcccatcaagagccctcctctcctgctcagtacacattaacatctctagcaatcacactaggtgtgattcagagcccctagctgtagactgttgctgcctgccagcatctctgcacaggttttctag

SEQ ID NO: 2236 - DNA, 171 bp, Homo sapiens
aaaaaattttttggcagagacagggtctcatcatgttgccctggctggtcttgacctactgggctccagcgatcctcctgccttggcctcccaaagtgctgggattacaggcgtgagccaccgcacccggccacacttttccaaattgtaagcaggtaggggggccctagg

SEQ ID NO: 2237 - DNA, 111 bp, Homo sapiens
  misc_feature 37: n = A,T,C or G
cgagctgctatgttccctgagacattagatgagggcntgcagatcccatctacacagtttgatgctgctcatcccactaatgtccagcgtttggctgaaccatcacagatg

SEQ ID NO: 2238 - DNA, 121 bp, Homo sapiens
gtgcgcgccaccaagcccagctcatttttgttttttagtagagatggggtttcacgatgttggctaggatggtctcgatctctggtcagagtcttttctgtaaatatccttggtaaagaag

SEQ ID NO: 2239 - DNA, 169 bp, Homo sapiens
cgcgtgtcggccttcatcggcagcaacatcatcacgtcgcagaacatctgggagggcctgtggatgaactgcgtggtgcagagcaccggccagatgcagtgcaaggtgtacgactcgctgctggcactgccacaggaccttcaggcggcccgcgccctcatcgtggtgg

SEQ ID NO: 2240 - DNA, 413 bp, Homo sapiens
aaaaaacttagagagagagagagagagaatcaaaataacctatgaagatttatagaaaacacaccaggtaaggaagggttctttcaaagcaaccacaggaacagttacgataacttaaaaagaaatgctttccacactgaactgacagcgctgcagaccacgcctgagtggggacggcagccccaagcccaggggcaagcgcccacaggctggacccaggccaggcacacctggggagtctcttactgctgaaaacctcagccatctcacttcatgtacttatcctgctggtcagccaggattttggcggaggacttggcatcatagaaaagttcactgatctcttcgacatgctctttctcaatgctgtccttcccgttgattttagcaagcaagttggccsgggccagcag

SEQ ID NO: 2241 - DNA, 174 bp, Homo sapiens
gcgctcccaggagaaacaagcttgaccactatgctatcatcaagtttccgctgaccactgagtctgccatgaagaagatagaagacaacaacacacttgtgttcattgtggatgttaaagccaacaagcaccagattaaacaggctgtgaagaagctgtatgacattgatgtgg

SEQ ID NO: 2242 - DNA, 158 bp, Homo sapiens
aaaacttctaaatggcctggtgagtatagtcttagtttagcttccttacttttttgtattcccaacctgaaatgatgtcatcccgtatcatcacagtatgttgctttttcagtacgaagttaatgggctttcctgctgtttaactgctttgagatttt

SEQ ID NO: 2243 - DNA, 302 bp, Homo sapiens
ctgggtgcaggcgggctgagtccgaaaagagagtcagcaaagggagatggggtggggccgttttataggattagggaaggtaatggaaaattacagtcaaagggggtttgttctctggtgggcaggtgtggatctcacaaagtacactctcaagggtggggagaattacaaaggaccttcttaagggtgggggagattacaaagtacatttatcagttagggtggggcaggaacaaatcacaatgttggaatgtcatcagttaaggctgtttttacttcttttgtggatcttcagttacttt

SEQ ID NO: 2244 - DNA, 519 bp, Homo sapiens
aaacaattctcttctgtttcagaatgcatatactacaactgctattaatgggacagatttctgtacatcagcaaaagatgcattcaaaatcttgtccaagaactcaagtcactttacatctattaactgctttggagacttcataatttttctaggaaaggtgttagtggtgtgtttcactgtttttggaggactcatggcttttaactacaatcgggcattccaggtgtgggcagtccctctgttattggtagcttttttgcctacttagtagcccatagttttttatctgtgtttgaaactgtgctggatgcacttttcctgtgttttgctgttgatctggaaacaaatgatggatcgtcagaaaagccctactttatggatcaagaatttctgagtttcgtaaaaaggagcaacaaattaaacaatgcaagggcacagcaggacaagcactcattaaggaatgaggagggaacagaactccaggccattgtgagatagatacctatttaggtatct

SEQ ID NO: 2245 - DNA, 304 bp, Homo sapiens
ctgggcctggacagcacgtgtgaggacagcatcgtggtgaaggaggtgtgcggagccgtgtcccggcgggcggcccagctctgcggtgctggcctggccgctatagtggaaaaaaggagagaagaccaggggctagagcacctgaggatcactgtgggtgtggacggcaccctgtacaagctgcaccctcacttttctagaatattgcaggaaactgtgaaggaactagcccctcgatgtgatgtgacattcatgctgtcagaagatggcagtggaaaaggggcagcactggtcactgctgtgg

SEQ ID NO: 2246 - DNA, 220 bp, Homo sapiens
aaaaattatgaaccatgcagaagtttagctcaagtagtagtactaatggtctacatccaattcaaaaccacatagttcattgatcacagatgcatggtattagtcacgaaagtttcagaacacattgtgttgattttgaaaggtcatttgcatcttctatgatttcaactttatctccatttaacttgcttgtaaagtatgtatgatgtattgtatattt

SEQ ID NO: 2247 - DNA, 492 bp, Homo sapiens
ccagaccgtacatctttttgtatatacatatctacacctgtgtctcttctttattaataaaaggtgtcttgatcacagtcccaaaccaactctgcattggattccagcatataaaactcagagagtaaaacaatttcaaaggaaggcaggctgcaaccacacctgcccgggcggccgcccgggcaggttgaagtgctggactccctggtcagcaatgtcaacattgagctgctcaatgccctccgctaccatatggtgggcaggcgagtcctgactgatgagctgaaacacggcatgaccctcacctctatgtaccagaattccaacatccagatccaccactatcctaatgggattgtaactgtgaactgtgcccggctgctgaaagccgaccaccatgcaaccaacggggtggtgcacctcatcgataaggtcatctccaccatcaccaacaacatccagcagatcattgagatcgaggacacctttgag

SEQ ID NO: 2248 - DNA, 304 bp, Homo sapiens
cctaacaaattagaattttccaataaaaaatatatattttttcagatgttaataagacatatcagtagagacaaaattaggattttgaagtaatgcaataaaaagatgttggagggcagaagtctatttagtttttgtatacacttgcaagagtgcattactcagtataaagcaaaatggggaggaaaaagacatccatccattttattggaacacttttatgtgacttgaatctggtgttaggttgttgatttttctaaaaatctcctatatatacaaaatccatatgtacttggagatccag

SEQ ID NO: 2249 - DNA, 396 bp, Homo sapiens
cctcaccgccgatgcaaggatagtcatcaacagggcccgggtggagtgccagagccaccggctgactgtggaggacccggtcactgtggagtacatcacccgctacatcgccagtctgaagcagcgttatacgcagagcaatgggcgcaggccgtttggcatctctgccctcatcgtgggtttcgactttgatggcactcctaggctctatcagactgacccctcgggcacataccatgcctggaaggccaatgccataggccggggtgccaagtcagtgcgcgagttcctggagaagaactatactgacgaagccattgaaacagatgatctgaccattaagctggtgatcaaggcactcctggaagtggttcagtcaggtggcaaaaacattga

SEQ ID NO: 2250 - DNA, 452 bp, Homo sapiens
cgctgcagaatggctcccgcaaagaagggtggcgagaagaaaaagggccgttctgccatcaacgaagtggtaacccgagaatacaccatcaacattcacaagcgcatccatggagtgggcttcaagaagcgtgcacctcgggcactcaaagagattcggaaatttgccatgaaggagatgggaactccagatgtgcgcattgacaccaggctcaacaaagctgtctgggccaaaggaataaggaatgtgccataccgaatccgtgtgcggctgtccagaaaacgtaatgaggatgaagattcaccaaataagctatatactttggttacctatgtacctgttaccactttcaaaaatctacagacagtcaatgtggatgagaactaatcgctgatcgtcagatcaaataaagttataaaatttcaaaaaaaaaaaaaaaaaaaaaaagcttg

SEQ ID NO: 2251 - DNA, 229 bp, Homo sapiens
aaatggagtgctcatctcattgaggagcagattaattttgcgtaagtactttgattatttaatatttgtaagaaaaaactttcattttcctacagaggaaaatagaacaattttagaagcaaggaacaatctcttttctaagtcttggaagctgtcagtgttgaggatgtaatctcctttgccatctttaattcacctaacttacactaggtgttctcttactgtcttt

SEQ ID NO: 2252 - DNA, 326 bp, Homo sapiens
ccatttgcttggatccgccagcctctatcacagtggctggcatgttgcaggctcctcagaaatattaacataatgactggagaacatttgaaaacattctaccttcaaattaaatatgaatccagattgaactaacttggggttgacatttcaaaaagaatgaatataataggacagtgtgcaggtagagttaatcatacccttaattattttacacctaaaatattaacatagaatcttcaaaactaatgaataaataaataaatagaagacttctcctaagcgatgctcaaacacattaggcacaatccaggtggcctctgcag

SEQ ID NO: 2253 - DNA, 294 bp, Homo sapiens
ccacaaatgtcacacaggtgaccagggtgctatagatggtgttcctgttgacttgggcttctagtctctgctccgtgtctgacagtgccaagatcatgctcccctgctccagcaagaagctgggcatagccccgtctgctggttccaccaggcctgggtgtgctgcagactttacaagctgaaccaccccagccatttggctacaagtcttttctaggccatcaagctgctctcgtaagccttctagacatgaatggacttgcctggaatgactaagctgctctttcaaggcag

SEQ ID NO: 2254 - DNA, 303 bp, Homo sapiens
ctgcagacttctgcctccctcaaattgtatcaaaatctcaagggaatatctaggtaactggaatatacacaatgactctatacaatcaagaggccagggcttaatcagattccgtgaggacaaggcaaatgatttcttcaaaacacccattttcttactggaagtggtaggaaaagcagcaatgcatggtttttttttttgtaattagtagacatggtcttctacccataagctccattacattaaaagaacaaagtgggcttaacatctcacttaagataattcagcattattatcagtttt

SEQ ID NO: 2255 - DNA, 238 bp, Homo sapiens
cctaatccgctggcctccctggggcctccctttctttgtgccaagccctgtgctgggtgctgggaactgggaacacagaatgaatcagacatagcctttgttcccatggggctcagtctcatggggaagacaaatgtgtatcaggcattattgacccaggatcatcagtgctccaataaaaagctcagagggtgggttgggaaggcttcctggaggaggaggtactggagggcttgaa

SEQ ID NO: 2256 - DNA, 140 bp, Homo sapiens
aaaggtccaaaagcctgccaacccctgggaattctacattgggacccagttgatggaaagactaaagccatctatgcagcacatgtttatgaagttctattctgcccacttattccagaatggcagtgtattagtaggag

SEQ ID NO: 2257 - DNA, 513 bp, Homo sapiens
aaacttaccacattacatgaacacttaaaatgagttttacaaccaagttaatgtatgtatacttttcacattatgtttttcacatttagtaatataagtgaaacactgattatttgttctattaaacaaaaaccaagtactcagtctaacaaatttattgtgtacagcatgagaaatactgataatgaagggaactgatttggcttttgcttctatagtgatcaatatgatcagaggattccttcacttacttttcttctcctaactagatgtaaaacaaaatccattacctgattgaaaccgtaagagaatttatcatctcttttccttcaaaacagcaatgatcacgaattattataaattaccagtatcatgaagttgcggatttgtctgaattaggattgacattaaaatacagcgggcagatggataaaaaagaagagataggtagatagttttggacggtgttgtagtgaaaagggacttgaaactcaaaacaaaacaaatccagtt

SEQ ID NO: 2258 - DNA, 177 bp, Homo sapiens
ccagtttggctctgtggaggagtgtctgctggacgagaacagcatgctgatccccatcgctgtgggtggtgccctggcggggctggtcctcatcgtcctcatcgcctacctcgtcggcaggaagaggagtcacgcaggctaccagactatctagcctggtgcacgcaggcacagcag

SEQ ID NO: 2259 - DNA, 347 bp, Homo sapiens
ctggcaaagcaagactttctcaatgaaagaagcaggacaccgatttacattctggtacaagcttcagtatgtttttcttattactgtgcctgcataattagaatatattcctataaaagtaaagcaaaactccaaaccacatttgttgatactgtaaccctttgcaagtgttatatagttcagagcaagctgtatgtcagcaatgaagctgaaaaataaattgttacttcctatgttagcaaaaccaatgtgttcatcaaattgtaacaaaaattcctttgcaggatcttatttgtctgagagttagtcttcgtatcactgtcctgtccctaaacacatcaagctat

SEQ ID NO: 2260 - DNA, 327 bp, Homo sapiens
cctcaagtggtccttccacctcggcatcccaaagtgctaggattataagcatgagccactgcacctggccccaacatcatttattgaacagactgtcgtttccacattgtgtttcttggcatttctgtcaaaaatcagttgaccgtaaatgcatggattcacttccgggctctctattctgtttcattggtctgtttgtttttatgccaataccatgatgttttgattattatagctttatagtatatcttgaagttaggtagtgtattgtctccagctttgttctttttgcttaagattgctttggctatttaggggtctttgtgg

SEQ ID NO: 2261 - DNA, 405 bp, Homo sapiens
aaaattcagcaaaatcatacgccatctaccgtgatgactgccaactccatggcagaccctttctgggattcaaaaaccaattcatcagatcgctgcctctgagggatgtacagattggctggggagctgagtgctacaataaaggaggaagtaccggggaacagtgcagggcaaaggcaggaaagagatctgagctgcctggagatcatctggggtgcggagtacaaagctttgcaagggtgtggttttggaatgacgctaaactgaaggtggagagaacagataaaaaggttggaagttgcacactgtacattgttaagaagttgagcttttatcttagaggcagcagaaggtttggagccaaggaatgaaatgatgaggcgtccttcaggtaatgaacttcag

SEQ ID NO: 2262 - DNA, 421 bp, Homo sapiens
caaggcttgtgtcaagaataacagtagaagaaggagaagaatccagcagatcctcaactgctgtacgacgacattcaacaatcacactggaccttcaagtgagaaggatccgtcctggagaaaatagagatcgggatagtattgcaaatagaactcgatccagagtagggctaacagaaaatacagtcactattgaaagcaatagtgggggctttcgccgaaccatttctcgtttagagcggtcaggtattcgaacctatgttagtaccataacagttcctcttcgtaggatttctgagaatgagcttgttgagccatcatcagtggctcttcggtcaattttaaggcagatcatgactgggtttggagaactgagttctctaatggaggccgattctgagtcagaacttcaaagaaatgg

SEQ ID NO: 2263 - DNA, 163 bp, Homo sapiens
ctggaggtgctcatggtgacaccgcacaggacttcctgcctgctagaaatcatctacccgcgtgttcctttcccctttctggggcaaaagccactgcgggccatgtacccaaataaacctcttaatgcgtttgttaaaattagtttggacatctgagtttccc

SEQ ID NO: 2264 - DNA, 269 bp, Homo sapiens
ccactcctggaaacccactgatagatgagtttcccccattcttctggcctccgccacatgatcaggaagctggacttgctcttatccaaccactcgaggttccctttcttcctcagttcctctaatacaatctggatcgactccacaggaagctttcgctgtagcttgacgttgttgaagagcgggctctcctgagcttccatcaccgtcatgctggactgtttgtgcaggcggcagaaggacaggaccagcgagcaccaggcggccag

SEQ ID NO: 2265 - DNA, 170 bp, Homo sapiens
aaagctaatgtaagcacatctaagggaataacatgatttaaggttgaaatggctttagaatcatttgggtttgagggtgtgttattttgagtcatgaatgtacaagctctgtgaatcagaccagcttaaatacccacacctttttttcgtaggtgggcttttcctatcag

SEQ ID NO: 2266 - DNA, 256 bp, Homo sapiens
aaagagaaattcatgaagtgtcttcataacaataattttgaaaatgccttgtgcagaaaggaatcaaaagaatatttagaatgcaggatggagagaaaattgatgctacaagaaccattggagaaactgggatttggagacttgactagtggaaaatcagaggcaaaaaaatgaattttgatgagaagacccctgggccgtgttcagtggtctctcaggacggagggcatcatcctgcctcttaggttggctgagg

SEQ ID NO: 2267 - DNA, 225 bp, Homo sapiens
aaaaaaatacagattaccaatttcaagtgctgccagctaaaataactgttttaacgggtatcttttgtttgttcttttcacttaattattttattgtgctttgcatctccaggcagttctctcacatttgggtaaaatgtttagcaggctgtaaacttaagaaaagggtaaaataaaattttctggagaggaacttggaatttgagggagattttatataccttt

SEQ ID NO: 2268 - DNA, 216 bp, Homo sapiens
gcctttacatttttggtgtgagatggggaagaaacataaaatgccactttacaacttcaataatagcctgtaatttatatttactgtgtgaatttttagtcctatattttaataatttgtaaattgatctcttattccaagaatcctttgaacttgtagaacatctgggagtccacttccctgtcctcttcctgatccctgctttctggactgttt

SEQ ID NO: 2269 - DNA, 204 bp, Homo sapiens
aaattcaccctgtactaactacagatagaagaaaaacagtattaacatgtgtattacagcactgcagttcactttctggatttgtgacacacaaacacatcatgcattctaagaagttaattttattagtgtcactagtgatgttaattaaaaaacttatagcaagtgctcaaaactttctaaatattgtaatcactatgtttt

SEQ ID NO: 2270 - DNA, 255 bp, Homo sapiens
aaatatcacaagtaggtcttaagtgtcatctggcatcttctttctgtagccaggtaactcttagatcttattcatcagcctgctgaacagttcctttttcagagacatagataccatccaaaaatttcctgatatccttgtttttaactgttgtggcttgctgaatcaaagccgctgaatttgaaacaagctcaatgtcatttccttcaaggattaattcatctttctgggcttgagatactgaacaagcaacac

SEQ ID NO: 2271 - DNA, 355 bp, Homo sapiens; identical to SEQ ID NO: 1867

SEQ ID NO: 2272 - DNA, 389 bp, Homo sapiens
ctgaaggggatgggatggtacgcctgtgagaagctacaggccaggttggtcaactggggacaagggagttcatggggacacggggcaaagacaaaaccaggtcgagggtccaaaggtgacttctcttttcccttaaggaccagatccctggcatccatgagaaggctgtgcccagcttttgttccattctccaccagtaccaggaaatgacctgtcttacgccataaggtttgaactacctcagtgcggtcagccttgctgggcagttcacttaaggaaaaagctgacactactacatcaaactgcaccttgggtgatacaggtagaaactgtctgaaaaagacacctggaatataaggctccccagattctgaaccacctttcagtag

SEQ ID NO: 2273 - DNA, 537 bp, Homo sapiens
ccagtggctaccacactggacagcacaggtctagagcagggattgataaactatagtccataggccaaattcagcctgcagcctcattttgtaaataaaattttactgaaatgcagccatgcccatttgtgtacatattgtctatggctacttccagttacaagggcagagctgagtaattatgacaaagactctacgacctgcaaagccagaagtatttactctctgtcccttcaaggaaaaagtttgccaactgccaatctagagcttgcatgacaaaggagatgccggaacctagctgaaagaatgacctgggaacagaggatgcctttggtccattctgggaagaaattactgctttattatactgcctatcactcctaaaaatgaccttagtaatttatatttgtcaacttcattcagtcataaaggcccttaccagaaacagaagctggcccaggtcacccatgggacgaaggtgcatgatgtcatatttatcacaccgatagggtatgattacctgtgaccccatgcgtc

SEQ ID NO: 2274 - DNA, 323 bp, Homo sapiens
cctagacattgatagccagcaggaagaagagccggttcaagcatctgatgavtcagatctcccctccaccagccaggatcctccttctagctcatctgtagatactagtagtagtcaaccaaagcctttcagacgagtaagacttcagacaacattgagacaaggtgtccgtggtcgtcagtttaacagacagagaggtgtgagccatgcaatgggagggagaggaggaataaacagaggaaatattaattaaatggtctgtaaacaataacaactgtgaatwagattatcaaatctgttttagtgtaatgattgtcaagttt

SEQ ID NO: 2275 - DNA, 282 bp, Homo sapiens
tcggtggtggcggagtctacggaagccgttttcgcttcacttttcctggctgtagagcgctttccccctggcgggtgagagtgcagagacgaaggtgcgagatgagcactatgttcgcggacactctcctcatcgtttttatctctgtgtgcacggctctgctcgcagagggcataacctgggtcctggtttacaggacagacaagtacaagagactgaaggcagaagtggaaaaacagagtaaaaaattggaaaagaagaaggaaacaataacagagtcag

SEQ ID NO: 2276 - DNA, 71 bp, Homo sapiens
ctggtgagatagctgtcacgggagcagggaggcttmcctgcaaacagatcatccatgctgttgggcctcsg

SEQ ID NO: 2277 - DNA, 110 bp, Homo sapiens
ctgagtcagcggcacattcagcaggcgttcagtggggaagcaggagacagaggcggcgctcacaggacccgctccaggcttgtcacagccacacatyacagcactttggg

SEQ ID NO: 2278 - DNA, 252 bp, Homo sapiens
aaagccaatcgattttgtacatgtttgaagatgctgctgtgcttcctcagcccgatggagggggccgaggagagtagcctgtttcggggaggcggggcacggggactgggtcaggagaagccccagggggacgtggaaccgagagattttcgggatggaacctgatggaaacgtccgtggtcaggaggaggctgcaggatggtggcgccgggctgcagacttgcggcagttttgctcacttccgattgctgg

SEQ ID NO: 2279 - DNA, 207 bp, Homo sapiens
ccaggccaagcaggatgacagcaaacgcattctgaacgtgtagcaatcaggtcccctgtaatgtgcttggagagtgtggacaagggccgagatgacgagctatgagctgtggaagggaatgggggaagcagaagggcacaaacagaagtactggagggagaggccgggctctcaggaagcagcaggcacgtgccaggtggaagccag

SEQ ID NO: 2280 - DNA, 336 bp, Homo sapiens
cctggacaatgcccgacgtctaactggattccatgaaacctccaacatcaacgacttttctgctggtgtagccaatcgtagcgccagcatacgcattccccggaggagagaggggaggaaggccacgtgtccacatggcagaaggcagagaggaatccatgcccaagctgtcttgacagctacaggagtttgtctgtgagggcggggctcccatcaggttccacctctctacactgttgctctggagaatgagtttctcactgtgaatctggggggcacattcagaccctattgtgggtgagtgggagagcatggctgtgtcactgggacaagtgg

SEQ ID NO: 2281 - DNA, 217 bp, Homo sapiens
aaaacttaagcattgtcattgctattttttttaatttgactttcctaggagtttaagaacagtgaaagttagcttcgcaccttcaaatgattttgaatgagggaaaaatcagtttgattccaaggatatttcttgccttacatggtcttttctttggcagtctgtacacctttattattaggttttgaattatttatgtaccagatattatagtttt

SEQ ID NO: 2282 - DNA, 472 bp, Homo sapiens
aaaacaagcaaattttattaaaggaaaattttgcaggtttaaggtttgcaggtgaaattttgtaggtgaaaaggtttacttttcaccagtctgttctggcatgcttctaatgatgtcagagtcacctggatcaatgatagccagtgtgcacactctgtagtattttccgcatgctatgcccagttcaatattattgccactgtagtgatggacaccagttttagccaacatagcatagtactctatttcagatttccccaaagctgggcagttgttagcgagaatgaccaatttcgctttgccttgtctgatcatcttcagagtctgcttgtaccccaggacgtacttcccacttttcataacgagttggagcctagagttgatcgactccagcgactttttcgtcttctttgcggccaccatcttcctgccttaggagcgggacggcccccaaccaacagcagccgctaag

SEQ ID NO: 2283 - DNA, 216 bp, Homo sapiens
ccaagggtcatgatggcaggagtaatcagaggtgttcttgtgttgtgataagggtggagaggttaaaggagccacttattagtaatgttgatagtagaatgatggctagggtgacttcatatgagattgtttgggctactgctcgcagtgcgccgatcagggcgtagtttgagtttgatgctcaccctgatcagaggattgagtaaacggctaggc

SEQ ID NO: 2284 - DNA, 362 bp, Homo sapiens
ccactcctgctgtatctacacctaccagtcactgaacacctgcccaagtgtgatggcttccatgcaggagacccaagtggctctgctagggagaatgacttatttacctaaggcttttttatttctcaaaagtggggggaaaaagggctggtttctagaaacagatgtggaattgaagaatgtcccagggaactaagttttaaggactaatcacaaacttgtttctccaacaacatcctgaatccattccttgcaccatcacacatttttcatgcatcagaagtgtttctagagctccagaaccacgagtacctcatcacgtcctgagcgctcacatcccccagcaagccgcctgcaccagg

SEQ ID NO: 2285 - DNA, 183 bp, Homo sapiens
ccattttttagaagagttactatttcaaatttcaagggagaagataagactgcatttcccccttaaggaaaaggctaagttaccaaggctgtattaaattgagtatgtgaaagttacctagcaaatccaggatagacagtgacccaatgaattctagttccataagtctcagttacaatattt

SEQ ID NO: 2286 - DNA, 353 bp, Homo sapiens
cctacagacttatttcttcttggacacacccacggtgcggccacggcggccagtggtcttggtgtgctggcctcggacacgaaggccccaggagtgacgcagccctctatgggcccgaatcttcttcagtcgctccaggtcttcacggagcttgttgtccagaccattggcaaggacctggctgtattttccatcctttacatccttctgtctgttcaagaaccagtctgggatcttgtactggcgtggattctgcataatggtgatcacacgttccacctcatcctcagtgagttctcccgccctcttggtgaggtcaatgtctgctttcctcaacaccacatgagcatatc

SEQ ID NO: 2287 - DNA, 242 bp, Homo sapiens
caagaggctgctaccagaaaccccaggcccctgttactcaaattcacagccagtgtggttgtgcctgactcctcgccagcccctggaaccacatccacctggggaggggccttctgaatggagttctgacaccgcagagggcaggccatgcccttatccgcactgccaggtgctgtcggcccagcctggctcagaggaggaactcgaggagctgtgtgaacaggctgtgtgagatgttcagg

SEQ ID NO: 2288 - DNA, 147 bp, Homo sapiens
ccagcatgggtcacagtatcaagcaatttttggtgtctctctctccttcatgctgtgagtttcctgagggcaggtgtggtgctagtacagtgcctggcacatagcaggcagaggggactctgtggaactctctgtctagatgccagg

SEQ ID NO: 2289 - DNA, 308 bp, Homo sapiens
cctagagatcgttcagggtgttgtaactgggaacatctgaatgctgaggcttagtccagtgttctctctcccttaccactcctcttccccttccctctataatggcagtacccagggcccggtccatagactactatcgagtgctcctatgtgcatcttagtacgtatcattttcccttgcctttttccttctatcctttcagtggtagcaactgcccttgctaatcaccgtaacctcggctgagaaagaagaggaagcgaaatccaaggtgcagctcagttcatcaaagcctagcaggtcccctcag

SEQ ID NO: 2290 - DNA, 499 bp, Homo sapiens
cctcgagtggtccgtgagtttggtcccgggtatagttccaaccctcagttccgactctggagaacctcttcctccttccagccgcttgagtttttgccaaacttgtagacgagtcgccggccatccacccgttccaggatctcccgtttgtagtagtacctcatggcccggctcagcttctcgtaggtcatgttgctgttctttttcttttggccccatagttgggccacagcctcggagcgcaggaacttgaagacgccttcatgccgattctcccacttcatgaggccctcgttgagctccgggtggatgaggatgtcccggatgaactcccacaggtgggtgcctctgggcgcgtgcttgctcttcttgccctcgagacagtcccagtactctttgctcagctttcggggccggcctcgtttccgcttcccgtgcttgggatcccccttcttgcagtcacgaaaaccatcgctggggaagagcttgccatcagtgg

SEQ ID NO: 2291 - DNA, 454 bp, Homo sapiens
ctgaagtcgctgctctccctcacccccgctagaggacctcaagactgtgatccacagggctctactgagcacaaaccctggggagagggcagcttcctggggctccatttagaaccacagccagaaaccctccttctaacaatttcactctggtacaaaagtcgcgaacagccacccatctcgagaacatgtccagctaccagaagtctgacatcaaagtggtccctacctcctgctgctcaggaaacagaataagagtctagacaaaaacaagagcctggggttttgagccaaaagcccaaaacaaatcactgaagaaacgggtgttcacggccagagtctcagaaccaacttcatggaagtgctgctggagagggggatgctgacagaactggttaacagggaagagtggtggggcccagattcacagtttgtggtaactgctgctgactgg

SEQ ID NO: 2292 - DNA, 219 bp, Homo sapiens
aaatgtgcattacctggttacataaaggactctagaacaacttargttcttttgggactgttgaaacattgtctttaaggacagaatgtactgggtgccattctctgtactctgaatatgcatgtgtattgcggtggggatgggggagttgggggccctcacttggtccttctctgttgtttttttccaggacaaagccaaaggccccttgttagctgg

SEQ ID NO: 2293 - DNA, 207 bp, Homo sapiens
aaagagaatgcaattcaaatcatggagaatcttttctaaagaaaatttcaatctgcttttttgatctgggcccacttaaatagtgtgatcgatctatctcttagctgaacaaattatacaaagcagcatttagacttatattcactctcaagtatcaagaggttttcagccttttcttactaactgagagattcttttttggttttt

SEQ ID NO: 2294 - DNA, 214 bp, Homo sapiens
aaatgtgatgttttgagcatcaaaaagctactatctaaaaggattagtctcccagtgttcttggtaaatggggaaggttaggaaggaggcaatgatccaatgaatatagaagaactggccgattcacaggaaacttgctttggataaggtgagtcaatgggtgatattgtgcaggcagggagggaaatttctttgtacaaattcatgtccctgg

SEQ ID NO: 2295 - DNA, 313 bp, Homo sapiens
ctgcctgtgctcctgagagatccttagggctgctgggagcaggccgggctggtgatctggggcgactcacacttgggaatcagcccccaggggatggaacagctcctcgggtgtcttgtcactttggctggctcccccctgccggaagccggaagcgatctcatcgaaggtccggcctttagtctcaggaactttgaagtaggtgaagatgaagaacagaaccaggagcacagtgaagatgatgaagacgtagggaccacacagttgctccacatactggaagcacatgcccacaatgaaatttgaggtccag

SEQ ID NO: 2296 - DNA, 378 bp, Homo sapiens
cctacaaggaaggcaagctacagaaggctttagaagatgccttcttggctattgacgccaaattgaccactgaagaagtcattaaagagctggcacagattgcagggcgacccactgaggatgaagatgaaaaagaaaaagtagctgatgaagatgatgtggacaatgaggaggctgcactgctgcatgaagaggctaccatgactattgaagagctgctgacacgctacgggcagaactgtcacaagggccctccccacagcaaatctggaggtgggacaggcgaggaaccagggtcccagggcctcaatggggaggcaggacctgaggactcaactagggaaactccttcacaagaaaatggccccacagccaagg

SEQ ID NO: 2297 - DNA, 240 bp, Homo sapiens
ccaattgatttgatggtaagggagggatcgttgacctcgtctgttatgtaaaggatgcgtagggatgggagggcgatgaggactaggatgatggcgggcaggatagttcagacggtttctatttcctgagcgtctgagatgttagtattagttagttttgttgtgagtgttaggaaaagggcatacaggactaggaagcagataaggaaaatgattatgagggcgtgatcatgaaaggtg

SEQ ID NO: 2298 - DNA, 218 bp, Homo sapiens
ctgtttcataggctggagatgcactcttctagactgctcgagacagccagagacaggggaggaggggagaaggatactgtggaaagggatggcggggcaaacatttagagctagaagccactactgggccaatgctaaagtttctgtctctaagcctaaaaaagccagtgtagtagggcccttatcactcttagtttgctaggtttcccctctgaaat

SEQ ID NO: 2299 - DNA, 162 bp, Homo sapiens
ctggaggccgaggagcagaggaagcagaagaagcggcagagtgtgtcgggcctgcacagataccttcacttgctggatggaaatgaaaattacccgtgtcttgtggatgcagacggtgatgtgatttccttcccaccaataaccaacagtgagaagacaaaa

SEQ ID NO: 2300 - DNA, 471 bp, Homo sapiens
aaatcctagctgattgttgtggtcaatgaaatacccagtttctggagggccaggtgggaaatgctttcactggactaacacacaaatgatcatcctgaggatctgagcttccctagactccacacaataaccttggggcacccttttagagaagactgttgaaacccacagcactcgttggggtatgaggaaaccagggcttggcacaggaagttcccctttgtagctaaaagtccagaaagaaagggttcatctttttgacttccaactgatattgggaagtttggttgaggttcaagtgtgactccttccagagccacaggtaggggagtgtgaagttgagggggaggaaagctagaaggactctgccttgggagattcccagctctgctttccagcgcttggtggaatctgggctggggaaagacggcaccgggaaactctgcttccccattgtttccatctgatcag

SEQ ID NO: 2301 - DNA, 477 bp, Homo sapiens
ccacacagactcaccaagccacagacttgtcttccacaagcacgttcttaccttagccacgaagtgaccaagccacacgtactaaaggttgaactcaaagatatgtacagggtattaaacaaataccaaggggaacagttaacttcaatacaaggtcaaaatcagcaacaagttctacaatccagtgctgatatcagatacaagcttcaaggacaatttcttttcgaaggtttattccagtttcgtgaggctagcatgaggtgtgtgcatttgccaggggcaaatttctattctcaattaacccatgcagcaaatgctacgcatctgctgagtccgtttagaagcatttgcggtggacgatggaggggcccgactcgtcgtactcctgcttgctaatccacatctgctggaaggtggacagtgaggccaggatggagccaccgatccacaccgagtacttgcgctctgggggtgcga

SEQ ID NO: 2302 - DNA, 177 bp, Homo sapiens
ctgtaaagcacgaacaggaatacatggaagtccgggagagaatacacagagccatcaacgacaacacaaacagcagagtggtcctttggtccttctttgaagctcttgttctagttgccatgacattgggacagatctactacctgaagagattttttgaagtccggagagttgttt

SEQ ID NO: 2303 - DNA, 333 bp, Homo sapiens
ctgccttacaattcactcattccatgtggaacaaacatttatcagatgcctattatgggcatatgtctctgctaagcaccatagttgtcaatgtgctgtgcaaatgctaagttccttttagcaattgttcagttggaagacgtattaatatttggggaaggaaaagaaagtagttgttttacaagggaggaaaaaagtgaatctggttacacatatggaagtaagcaaaatgaaaagcacttattgctttctgacagaattatagatgtaattttaagagttgctcctagcaagttaaaagtgcatataaaatatgcaactcttagttaaagg

SEQ ID NO: 2304 - DNA, 241 bp, Homo sapiens
aaataaattacagtatgtctatatgatgaaatgttattttgccattaaaattttgtttacaaagataatttttattgacataaaaataactttaatgtaatttatgttgaaaaagctgaatacaagtctttatatagagtaatatttgagctgtgttcaaaaatacataggaaaagactgataaaatgaaatatggcaaaatgttaatagttttccctggaataggataataggcaatttt

SEQ ID NO: 2305 - DNA, 553 bp, Homo sapiens
  misc_feature 538: n = A,T,C or G
aaatgttaatacaacaggattttttttttctttttgtaagagaaagcaaatctgtacaaaaatactctggttgcaagaaaagctagggcatactgttcaactaagagtagtttagctgttggaaaaataagagcatttaattttatctaaaaatatgtataaatcccctcaaaatggtaatgaatcatacacagtacatactaaaaatatttcctagtatgaggagcgttatggagtggaagtgaaatcacatggctaggccggaggtcattaggagggctgagagggcccctgttaggggtcatgggctgggttttactatatgataggcatgtgattggtgggtcattatgtgttgtcgtgcaggtaggggcttactagaagtgtgaaaacgtaggcttggattaaggcgacagcgatttctaggatagtcagtagaattagaattgtgaagatgataagtgtagagggaaggttaatggttgatattgctagggtggcgcttccaattaggtgcatgagtaggtggcctgcagtnatgttagcggttagg

SEQ ID NO: 2306 - DNA, 174 bp, Homo sapiens
ctaatccaaagggagtttcagaccagtgcaatcagcagagacattgatactgctgccaaatttattggtgcaggtgctgcaacagtaggagtggctggttctggtgctggtattggaacagtctttggcagccttatcattggttatgccagaaacccttcgctgaagcagcag

SEQ ID NO: 2307 - DNA, 352 bp, Homo sapiens
ccagatggaaaggcaagtggaaggctttgcagggacaagcaatgtaagcagaacctagaaatgggaaggaacaaaagtgaaggggaatgattgtgggtcaggggccaatggcgatgtgacattcagcctatagaaccatagggcagaggtgacagttgctggaatagatgggagctcagtttaaggaagatcgccaagccagacatcgctgttagatggatgtaatggggaataaactgccattgtcaactcaaaagtaaccagggccaggtgtgggggctcacacctgtaatcccaatactttgggaggccgaggcaggtggattacttgaggtgaggagtttgagaccag

SEQ ID NO: 2308 - DNA, 197 bp, Homo sapiens
ctggactgtacagaacactccaagggccaatggcagttcagcgcaaggagagggagggcccacaggtcagaaaaagctccagagacctcacagcattgtagggcggggtggtgggccaaagttaggacactgcgtaaaacaggccatcccaccacctctacctgctcatgccaggagaatccataactgcctagagg

SEQ ID NO: 2309 - DNA, 330 bp, Homo sapiens
ctgatttataatcttctaaaggaagaacagaccccccagaataagattacagttgttggggttggtgctgttggcatggcctgtgccatcagtatcttaatgaaggacttggcagatgaacttgctcttgttgatgtcatcgaagacaaattgaagggagagatgatggatctccaacatggcagccttttccttagaacaccaaagattgtctctggcaaagactataatgtaactgcaaactccaagctggtcattatcacggctggggcacgtcagcaagagggagaaagccgtcttaatttggtccagcgtaacgtgaacatcttt

SEQ ID NO: 2310 - DNA, 231 bp, Homo sapiens
aaaaaattataatgcacgttagatgaaaagtaataggatgagatggttgttgctgaaatagcacttgctatataaattcaaacattccttttcaaattcagcttctcagaggtttgacttcagatgcttgagcactttcaacattatctttgcctttatccttctttatgcggataaacacaactgctaaaattataccaatcaccagaagggtggtcagcagtataccaa

SEQ ID NO: 2311 - DNA, 396 bp, Homo sapiens
tgcccctgtattggattgccacacggctcacattgcatgcaagtttgctgagctgaaggaaaagattgatcgccgtcctggtaaaaagctggaagatggccctaaattcttgaagtctggtgatgctgccattgttgatatggttcctggcaagcccatgtgtgttgagagcttctcagactatccacctttgggtcgctttgctgttcgtgatatgagacagacagttgcggtgggtgtcatcaaagcagtggacaagaaggctgctggagctggcaaggtcaccaagtctgcccagaaagctcagaaggctaaatgaatattatccctaatacctgccaccccactcttaatcagtggtggaagaacggtctcagaactgtttgtttcaattgg

SEQ ID NO: 2312 - DNA, 253 bp, Homo sapiens
cctccacaaactccttgaggggtttactgtagtttccttccaacgtcggtgggttgttctttggaatgaggaataaaactttcatggggtgcagctcggaatgaggtggttcccctcttgcaagttcaatagctgttatgcccagggaccagatgtctgccttcgagtcataggccgactgtttgatgacctcgggtgccatccagaatggggtgcccacgaaggtgttccttttgatctgggtgtctgtcag

SEQ ID NO: 2313 - DNA, 449 bp, Homo sapiens
gaagaataatggggcaggctactttttggagcatctggctttcaagggaacaaagaatcggcctggcagtgccctggagaaggaggtggagagcatgggggcccatcttaatgcctacagcacccgggagcacacagcttactacatcaaggcgctgtccaaggatctgccgaaagctgtggagctcctgggtgacattgtgcagaactgtagtctggaagactcacagattgagaaggaacgtgatgtgatcctgcgggagatgcaggagaatgatgcatctatgcgagatgtggtctttaactacctgcatgccacagcattccagggcacacctctagcccaggctgtggaggggcccagtgagaatgtcaggaagctgtctcgtgcagacttgaccgagtacctcagcacacattacaaggcccctcgaatggtgctggcagcag

SEQ ID NO: 2314 - DNA, 298 bp, Homo sapiens
ctgacagcactcactgggcggatccaggaggccggcacggaggtggtcaaggctaaagccggagcaggctctgccaccctctccatggcgtatgccggcgcccgctttgtcttctcccttgtggatgcaatgaatggaaaggaaggtgttgtggaatgttccttcgttaagtcacaggaaacggaatgtacctacttctccacaccgctgctgcttgggaaaaagggcmtcgagaagaacctgggcatcggcaaagtstcctcttttgaggagaagatgatctcggatgccatccccg

SEQ ID NO: 2315 - DNA, 513 bp, Homo sapiens
aaaaacagctctaaaccatygtaacctttgtcgaakargtttttattactaccaaaggcattttgtasattctgagttggaatgcratgatgtgatcttgttttggcgtatacagcrcatgcttgctatcaccrcaratactttaaggcaacaacttacaaatactgaagttargcgattagagaaaaatgttaaagaggtattggaagattttgctgaagatggtgagaagaagattaaattgcttactggtaaacgcgttcaactggcggaagacctcaagaaagttakagaaattcaagaaaaacttgatgctttcattgaagctcttcatcaggagaaataaattaaaatcgtactcataatcagctctgcatacatctgaagaacaaaaacatcaacgtcttttgtccagcctctttttcttctgctgttccacctttctaaacatacaataaagtcatgggataaaaataatcgatgtatgttacgggcgctttaaccatcagacct

SEQ ID NO: 2316 - DNA, 156 bp, Homo sapiens
ccatggtctacatgggggcaaagggaaacaccgctgcacagatggcccagatactttctttcaataaaagtggcggtggtggagacatccaccagggcttccagtctcttctcaccgaagtgaacaagactggcacgcagtacttgcttagggtgg

SEQ ID NO: 2317 - DNA, 313 bp, Homo sapiens
ccaggggtgctaagcagttggtggtgcaggaggcattgctgatgatcttgaggctgttgtcatacttctcatggttcacacccctggattccgagagcaataataagatatcggtaggagatcttctcgtcgtcatctgtgtgaatgcagttcttgtctgggttcaactcagtcactctagctttgatccattctacaccagatggaatcacacttgccgtgggacgaccagatgaggacaattgtttggcaccagcacccaccagtgtccagattggctggtagaaatgtctctcactgggctcaacaatag

SEQ ID NO: 2318 - DNA, 429 bp, Homo sapiens
ctgagggaggggctggagacaggtctgaggaggaggcgtcatccacggagaaaccaaccaaagccttgcccaggaagtccagagaccccctgctctctcagcggatctcctccctcacagcatcactacatgcacacagccgcaaaaaggtcaagaggaaacatccccgacgggcccaggactccaaaaagcccccaagggcccctcgtaccagcaaggcccagcgccgccgtctcacaggcaaagcacggcacagcggggagtgagaccgagaacgaagcggtgccccagtctaggctgcggggacctgtccttgctcagcttggctgtccctgtagcccagcctgcacctaggtaatgactgcacagctcaaggttgggaagccaggacctctctggcctggggccagcctaggttgaggttgacca

SEQ ID NO: 2319 - DNA, 392 bp, Homo sapiens
cctaagctaaatcgagagaactttccaggtgtttcatgggactcccttccggatgagctgctcttgggaatcttttcctgtctgtgcctccctgagctgctaaaggtctctggtgtttgtaagaggtggtatcgcctagcgtctgatgagtctctatggcagaccttagacctcacaggtaaaaatctgcacccggatgtgactggtcggttgctgtctcaaggggtgattgccttccgctgcccacgatcatttatggaccaaccattggctgaacatttcagcccttttcgtgtacagcacatggacctatcgaactcagttatagaagtgtccaccctccacggcatactgtctcagtgttccaagttgcagaatctaagcctggaagg

SEQ ID NO: 2320 - DNA, 344 bp, Homo sapiens
aaagaatcagcaaaatttcaaataaaaaattatgaaaatattatcctcattagttcatttagtcccatgaaattaattattttctctgcttgatcttggtggacagtttcatgaagctgtcagttagttcattaaagttttggaaattctcagacagtgcagtggtatcagaaacttgtattcaagagtacaggtcagagtcttcttttcttttctttttgagacggagtcccgctctgttgccagactggagtgcagtggtgcgacctgggctcactgcaatctccacctcccgggcccaagcgactctcctgcctcagcctcccgagtaactgggaccacag

SEQ ID NO: 2321 - DNA, 443 bp, Homo sapiens; identical to SEQ ID NO: 1118

SEQ ID NO: 2322 - DNA, 182 bp, Homo sapiens
aaagaaaactagaaagttttaatgttttaacttggggaaaaatacatctctttaatgtttagcatgcttgtcaaccttgagtgagtgtcatttttaagaacagttgtagcccttctgattattgcagtagctgtagaagtatgtaagaatatgtgatgggtgtagtcattagcaaagcattt

SEQ ID NO: 2323 - DNA, 166 bp, Homo sapiens
aaaactgttaagtccagtataattttccctgatatgaaaaaatgtgcatttttttcacttagcagcaaagtaccttctaatttccaatagtccgtgaaagttggggctgaagtacctaagtgtgaatgtctctcctgttaaactgagtgtagaaatctgaattttt

SEQ ID NO: 2324 - DNA, 157 bp, Homo sapiens
cctatattcacacacgtatgcgggcgaaaacgtctgacttcctcaaggtgctgaaccgcgcacgcccagatgccgagaaaaaagaaatgaaaacaatcacggggaagacgttttcatcccgctaatcttgggaataagaggaggaagcggctggcaa

SEQ ID NO: 2325 - DNA, 255 bp, Homo sapiens
ctgccagaagcagatctttggtctcatttgaaatagagatctcacatcctgagagggcctggctggcctgggcagcgtagaagagggaatccacattgctgggatcaaggttagatctgatgtaggtacatgctttctttgcatctggcacctgagcaccaaggctgctgagtcccacgatggagtagaaggcagattccaaatttgtgaaagggcgatccagcgaggcttttagtctctccacgtcatgcttgg

SEQ ID NO: 2326 - DNA, 244 bp, Homo sapiens; identical to SEQ ID NO: 1720

SEQ ID NO: 2327 - DNA, 197 bp, Homo sapiens
cgagataaaaccatcaagctatggaataccctgggtgtgtgcaaatacactgtccaggatgagagccactcagagtgggtgtcttgtgtccgcttctcgcccaacagcagcaaccctatcatcgtctcctgtggctgggacaagctggtcaaggtatggaacctggctaactgcaagctgaagaccaaccacattgg

SEQ ID NO: 2328 - DNA, 308 bp, Homo sapiens
ctgaatggagaaatccggcagcaggttgaaaagtctgttctgagaacagattattgctgagcagagttcatgtgacttctagacgtggtgacttaaaaaatggccttaaggctgcagagccagccacctctgcttacaaaaagagtacttagtgcacatgactgtaagaaacaattgtaaaacctcatctagaaatcagaaagcttctaatttctatagaaatgacacctccctggagccgagagacaatctgttgttgattttgaaggacaggcaagaccaacactgtatttagttccatagccagg

SEQ ID NO: 2329 - DNA, 320 bp, Homo sapiens
  misc_feature 81: n = A,T,C or G
aaattycaacagctctcaacaaacttaaaaaaagtcaggtgtttttaatggcccaggatgggagagggaagaaagttgywnaacagtcarggaaacaaaatggcaccacaagcagggggtgaaatgatgggcagtakggatccagggaaggaagtgagggtaaatarggttaactgaccaagcaaaaaggaagggtmcagcaaccasagggctccaagaggtctcaggctasgtttctaagamaataagaggtaacactagaatctaagattttagtgatgaaacaattctgtcasaagaccatttcgaaggtgtaacca

SEQ ID NO: 2330 - DNA, 323 bp, Homo sapiens
gctcaggctacactatcccaggatcagcatggccgtccgccagtggataatcgccctggccttggctgccctccttgttgtggacagggaagtgccagtggcagcaggaaagctccctttctcaagaatgcccatctgtgaacacatggtagagtctccaacctgttcccagatgtccaacctggtctgcggcactgatgggctcacatatacgaatgaatgccagctctgcttggcccggataaaaaccaaacaggacatccagatcatgaaagatggcaaatgctgatcccacaggagcacctcaagccatgaagtgtcag

SEQ ID NO: 2331 - DNA, 63 bp, Homo sapiens
ccagtgaacaaatcctactctgaagctagacatgtgctttgaaatgattatcatcctaatatc

SEQ ID NO: 2332 - DNA, 83 bp, Homo sapiens
cctggcggctgtaggagagagcagtgaatcctaagggcaagagaatggcgtccacttgccagagtttctcagagcagagccag

SEQ ID NO: 2333 - DNA, 86 bp, Homo sapiens
ccaagctctcaccagccaaccagcggaaatgtgagcgtgtactgctggccctattctgtcacgaaccctgccgccccctgcatcag

SEQ ID NO: 2334 - DNA, 387 bp, Homo sapiens
ttgatcaatttgcaattgttttcttgacaggtcgttccaggggtagaggaggcatgaaggatgaccgtcgggacagatactctgcgggcaaaaggggtggatttaatacctttagagacagggaaaattatgacagaggttactctagcctgcttaaaagagattttggggcaaaaactcagaatggtgtttacagtgctgcaaattacaccaatgggagctttggaagtaattttgtgtctgctggtatacagaccagttttaggactggtaatccaacagggacttaccagaatggttatgatagcactcagcaatacggaagtaatgttccaaatatgcacaatggtatgaaccaacaggcatatgcatatcctgctactgcag

SEQ ID NO: 2335 - DNA, 135 bp, Homo sapiens
tgcgcggggctggggcctacatctgtggagaggagacagcgctcatcgagtccattgagggcaagcagggcaagccccgcctgaagccccccttccccgcagacgtgggagtgtttggctgccccacaactgtgg

SEQ ID NO: 2336 - DNA, 247 bp, Homo sapiens
ccttgcgagtgatcctaccataaattcagtcttctgggagcgtgacacacccaccagaacaatgccctatatatatttggtgctcaaaaagtgtttaatttcttaaacttttatcagacacctatgtgcaaggtgctgggggcatggctgaggaccttctctttgcccagagtgaccctgaagataaatagcatcacaatcactttccataataacaataacgtaaaatcctaacaagactgtattt

SEQ ID NO: 2337 - DNA, 442 bp, Homo sapiens
aaaaaatgacaaagcaaaaacaaagccacctcttcaggtaacgaaggtggaaaataatttgattgtagataaagccaccaagaaagcagtcatagttggaaaggagagtaaatctgctgctacaaaggaggaatcagtatctcttaaagagaaaaccaaaccacttacaccaagcataggagccaaggagaaggagcaacatgtagctttagtcacctctacattaccaccgttacctttgcctcccatgctgcctgaagataaagaagctgatagcttacgaggaaatatttcagtaaaagcagttaaaaaagaagtagaaaagaaactccgatgtcttcttgctgatttaccgctgccccctgagctaccaggaggagatgatctttcaaagagtccagaggaaaagaaaacagcaacacagttacatagtaaaaggagg

SEQ ID NO: 2338 - DNA, 144 bp, Homo sapiens
aaaattaaaagagcatccggttttggtatggggatgatccaggattatgttgtgactgatacatattagttacttgtgcttttttttttttttggatctttgcaagggcaaaactacaagtaacgagttttatataattaattt

SEQ ID NO: 2339 - DNA, 63 bp, Homo sapiens
ccagactggtctcgaactcctgacgtcaaagtgatccacctgcctcggcctcccaaagtactg

SEQ ID NO: 2340 - DNA, 247 bp, Homo sapiens
cctacagctctgccggggaggaggagggggaggaagaggaggagaaggtagctacagcaagctgggtagcaggcagatccaaaggatatcatgaagtttccagggcctttggaaaaccagagattgtctttcctgttggaaaaggcaatcactagggaagcacagatgtggaaagtgaatgcgcggaaaatgccttcaaatcagaatgtttctccatcccagagagatgaagtaattcaatggctgg

SEQ ID NO: 2341 - DNA, 447 bp, Homo sapiens
ctgcaagatgcactagccggctgaacccgggatcggctgacttgttggaaccggagtgctctgcacgaagagtggtggatgagttgaagttgccttcccggggctcattttccacgctgccgagaggaatccgagaggcaaggcaatcacttcgtcttgccattgattgggtatcgggagctttttttttctcccctctctctttcttttcctccgtcttgttgcatgcaagaaaattacagtccgctgctcgcccgccctgggtgcgagatattcagccccgctctctcccgtgcattgtgcaacccaaagatgaaagaccgaaggggagaaagttaaagaaatcgcccacatgcgctggatcagtccacggcttggggaaaggcatccagagaaggtgggagcggagagtttgaagtctttacaggcgggaagatggcggactgg

SEQ ID NO: 2342 - DNA, 263 bp, Homo sapiens
ctggtgtgggcctcatagatgcggagaagggaggcagcctggtggtgggggacttcgagatcgcagccaagtacggtgggagtcacctggagcgtgaagggacgtgtctcatccccagtgtgtcggaccctggagacacagccgcagagcagccccttctcatgcatggacctcacctacgtcagcctgctactccaggagttcggctttcccaggagcaaagtgctgaagctcactcggaaaattgacaatgttgagaccag

SEQ ID NO: 2343 - DNA, 368 bp, Homo sapiens
cctgcctggcctgctgggggtctcaaagactggagtgagcagataggggggctggcacaaagcgggtgttgggaagagaagatcaggctggtggttgctggagcccactgactgcagcagggtggtagactggactctagacttctatgttccagggtgcagggctctgatgcccccagctctaccctagggcagggccctgggggtccagactgcccctgggtgctgggctgaaggggcccgggttctgctggagggcagggctcargtacctcaagctgttcctggcgagaggactccggtatctcaggctcaatcctacagtaggactctaggggcctgggttctgctggagggcagggttcagg

SEQ ID NO: 2344 - DNA, 344 bp, Homo sapiens
ctgtccaatgacaacaggaccctcactctactcagtgtcacaaggaatgatgtaggaccctatgagtgtggaatccagaacgaattaagtgttgaccacagcgacccagtcatcctgaatgtcctctatggcccagacgaccccaccatttccccctcatacacctattaccgtccaggggtgaacctcagcctctcctgccatgcagcctctaacccacctgcacagtattcttggctgattgatgggaacatccagcaacacacacaagagctctttatctccaacatcactgagaagaacagtggactctatacctgccaggccaataactcagccagtgg

SEQ ID NO: 2345 - DNA, 528 bp, Homo sapiens
  misc_feature 438: n = A,T,C or G
cctacgatcacaaagtccaccagcacgtggccctaaagatggtgcggaatgagaagcgcttccaccggcaagcagcggaggagatccgaatcctggaacacctgcggaagcaggacaaggataacacaatgaatgtcatccatatgctggagaatttcaccttccgcaaccacatctgcatgacgtttgagctgctgagcatgaacctctatgagctcatcaagaagaataaattccagggcttcagtctgcctttggttcgcaagtttgcccactcgattctgcagtgcttggatgctttgcacaaaaacagaataattcactgtgaccttaagcccgagaacattttgttaaagcagcagggtagaagcggtattaaagtaattgattttggctccagttgttacgagcatcagcgtgtctacacgtgcatccagntcgcgtttttaccgggctccagaagtgatccttggggccaggtatggcatgcccattgatatgtggagcctggctgsattttagcagagc

SEQ ID NO: 2346 - DNA, 272 bp, Homo sapiens
cctctaaagatcaaaacacccctgtcgtccaccctcctcccactccagggagctgtggtcatggtggtgtggtgaacatcagcaaaccgtctgtggttcagctcaactggagagggttttcttatctatatggtgcttggggtagggattactctccccagcatccaaacaaaggactgtattgggtggcgccattgaatacagatgggagactgttggagtattatagactgtacaacacactggatgatttgctattgtatataaatgct

SEQ ID NO: 2347 - DNA, 279 bp, Homo sapiens
ctgaccccgcctgagggctcctcaaagtctgagcaagaccaggcagaaaatgagggcgaggactcggctgtgttgatggagagactgtgcaagtacatctacgccaaggaccgcacagaccggatccgcacatgtgccatcctctgccacatctaccaccatgctctgcactcgcgctggtaccaggcccgcgacctcatgctcatgagccacttgcaggacaacattcagcatgcagacccgccagtgcagatcctttacaaccgcaccatggtgcag

SEQ ID NO: 2348 - DNA, 305 bp, Homo sapiens
aaagtatgatttatcttgtaaacaagaccaaaaatattcagttgatctgtattttgagcataaatatttataaactctattaaaaaaacaaatatagcatgactagagcagcttaatagtgtaaaatctaagtattgaaaaatatagatatataaaaggctttcactatgcaatcatgcagaggaaactgcttcattcaattacacaaaagtgattctgtacagttatctacaatagctccatgagaatcctatttaggaaaataaaataatgaaaaccttatctctaatcaacacggggatttt

SEQ ID NO: 2349 - DNA, 185 bp, Homo sapiens
ctggggagtagtggatgtctgcaaaaaccagaagcggcaaaagcaggtacctgctcacgcccgagactttcacatcaacctctttcaagtgctgccctggctgaaggagaaactccaagatgaggatttgggttttctataaggggtttcctgctggacaggggcgtgggattgaattaaaacag

SEQ ID NO: 2350 - DNA, 363 bp, Homo sapiens
aaaagaatagcttggcctggctggtggctcacgcctgtaatcccagcactttcggaggccaaggtggatcacctgaggtcaggagttcgagaccagcctgaccaacatggtgaaaccccgtctctactaaaaatacaaaaattagccaggcgtggtggcgggtgcctgcaatcccagctactccggaggctgaggcacgagaatcgcttgaacccaggaggcggaggttgcactgagccaagatcgtaccgktgcactccagcctgggcgagagagtgagattctgtctcaaaaaaattaaaaataaaagaaaaatcttaaacactgataaggctgacactctasatgcatcttctaggaagg

SEQ ID NO: 2351 - DNA, 525 bp, Homo sapiens
gcgcattttcttgcaccaactaatgcggtgtcgctggcggctgaggagggcggagagttctgtggtgaaatagtgggaaggattcatgtaggcatcgggaagagcctaagtccacattataaaataggaagttgatgcggggtacagttactcccggaccggcggcgtgaaagtcgtgatatcatcgttgaactattagctttgaagtttacctgcccgggcggccgcccgggcaggtccaaggtctgattcaagaggctgtgaggagagtagagaacaaatagactttgcctctcagagttcagagctttaagttgtataagcatggtccatgtccacctcttgtagacacttattccttaaaagtttccatcatgaaaaataatatcatgtcaaaattttataagcacccagaatgtcccagtagtcaaatgtagtgtctttctccagtctctgttttcgataataaataccttgctctcaatttaggatgatcgtaaagcctatgttcatgctktgagtcat

SEQ ID NO: 2352 - DNA, 275 bp, Homo sapiens; identical to SEQ ID NO: 1958

SEQ ID NO: 2353 - DNA, 237 bp, Homo sapiens
ctgctaaaatcaccagaagggattttggaaccgctgtactagtgtcctttcattcgatgggatgtccaggcttcaccccaaagaggcttcatttatgcttcttctcctgtgtgctggtgaaccaagagtctaggagcttcttgctgtagtacaactgccaggcatgcacttgcactgccaacaccaacaccaggtacatgatggaaacggcagaaaaaccaaagaggaaacggtagg

SEQ ID NO: 2354 - DNA, 259 bp, Homo sapiens
ccacctggtgtcggccatcggccagaagattttcctgtggagcctgcgggccagcgagctgacgggcatggccttcatcgacacgcagctctacatacaccagatgatcagcgtcaagaacttcatcctggcagccgacgtcatgaagagcatttcgctgctgcgctaccaggaggaaagcaagacgctgagcctggtgtcgcgggatgccaagcccctggaggtgtacagcgtggacttcatggtggacaatgcccag

SEQ ID NO: 2355 - DNA, 312 bp, Homo sapiens
ctgaagatgatgaggatgacgatgtcgataccaagaagcagaagaccgacgaggatgactagacagcaaaaaaggaaaagttaaactaaaaaaaaaaaaaaggccgccgtgacctattcaccctccacttcccgtctcagaatctaaacgtggtcaccttcgagtagagaggcccgcccgcccaccgcgggcagtgccacccgcagatgacacgcgctctccaccacccaacccaaaccatgagaatttgcaacaggggaggaaaaaagaaccaaaacttccaaggccctgcttttttcttaaaagtacttt

SEQ ID NO: 2356 - DNA, 325 bp, Homo sapiens
ctgaatgcagagctgggcttggagccagagacaccgccaaaaccccctgatgctccacccctggggcccgacatccattctctggtacagtcagaccaagaagctcaggccgtggcagagccatgagccagccgttgaggaaggagctgcaggcacagtagggcttcttggctaggagtgttgctgtttcctcctttgcctaccactctggggtggggcagtgtgtggggaagctggctgtcggatggtagctattccaccctctgcctgcctgcctgcctgctgtcctgggcatggtgcagtacctgtgcctaggattggtttt

SEQ ID NO: 2357 - DNA, 287 bp, Homo sapiens
aaaagacctgatggggagatgaacattgcatctggctgtccccgctttgtggctcattctgttttggagaatgccaagaacgcctacattaaagatgacactctgttcttgaaagtggccgtggacttaactgacctggaggatctctagtcactgttatggggtgataagaggacttcttggggccagaactgtggaggagagcacatttgattatcatattgacctggatttagactcaaagcacatttgtatttgcctttttccttaacgtttgaagtcagttt

SEQ ID NO: 2358 - DNA, 283 bp, Homo sapiens
ctggcgctgtcctggacttgatgggggatgaagcccagaacctgacgaggggccggcagcagctcaagtgggaccgtaagaagaagcggtttgtgggacagtcaggacaggaagacaagaagaagattaagacagagagcggccgctacatcagcagctcctacaagcgagacctctatcagaagtggaaacagaaacagaaaattgatgatcgtgactcggacgaagaaggggcatctgaccggcgaggcccagagcgaagaggtgggaagcgagaccgtgg

SEQ ID NO: 2359 - DNA, 509 bp, Homo sapiens
ctggggccactgtcggcatcatgattggagtgctggttggggttgctctgatatagcagccctggtgtggtttcttcatttcaggaagactgacagttgttttgcttcttccttaaagcatttgcaacagctacagtctaaaattgcttctttaccaaggatatttacagaaaagactctgaccagagatcgagaccatcctagccaacatcgtgaaaccccatctctactaaaaatacaaaaatgagctgggcttggtggcgcgcacctgtagtcccagttactcgggaggctgaggcaggagaatcgcttgaacccgggaggtggagattgcagtgagcccagatcgcaccactgcactccagtctggcaacagagcaagactccatctcaaaaagaaaagaaaagaagactctgacctgtactcttgaatacaagtttctgataccactgcactgtctgagaatttccaaaactttaatgaactaactgacagcttcatgaaactg

SEQ ID NO: 2360 - DNA, 231 bp, Homo sapiens
ttgccaaagcctccgattatgatgggtattactatgaagaagattattacaaatgcatgggctgtgacgataacgttgtagatgtggtcgttacctagaaggttgcctggctggcccagctcggctcgaataaggaggcttagagctgtgcctaggactccagctcatgcgccgaataataggtatagtgttccaatgtctttgtggtttgtagagaatagtcaacggtcg

SEQ ID NO: 2361 - DNA, 344 bp, Homo sapiens
ccgctggctgagttattggcctggcaggtatagagtccgctgttcttctcagtgatgttggagataaagagctcttgtgtgtgttgctggatgttcccatcaatcagccaagaatactgtgcaggtgggttagaggctgcatggcaggagaggctgaggttcacccctggacggtaataggtgtatgagggggaaatggtggggtcgtctgggccatagaggacattcaggatgactgggtcgctgtggtcaacacttaattcgttctggattccacactcatagggtcctacatcattccttgtgacactgagtagagtgagggtcctgttgtcattggacag

SEQ ID NO: 2362 - DNA, 234 bp, Homo sapiens
ctatagggcgaattgggccctctasatgcatgctcgagcggccgcccgggcaggtaaaaatgcttgtcttcctcactagacaatcaactctatgagggcagagactatgtcaccactgtcccgccagcccctggcacacagtaggtactcaataaatatatgttggaaggatggatggaggtaatggatggaaagatggatggaaggatgaatggaggratggatgtgacccag

SEQ ID NO: 2363 - DNA, 129 bp, Homo sapiens
ccagcatcactacaacaagctgattacatcaccttgtaaaacttaagatggggatgaatagtgtttggcaattacatttctgggagaaaaaactgctgattttttctttaactcgacacagctagcttt

SEQ ID NO: 2364 - DNA, 411 bp, Homo sapiens
aaaacaagcaaattttattaaaggaaaattttgcaggtttaaggtttgcaggtgaaattttgtaggtgaaaaggtttacttttcaccagtctgttctggcatgcttctaatgatgtcagagtcacctggatcaatgatagccagtgtgcacactctgtagtattttccgcatgctgtgcccagttcaatattattgccactgtagtgatggacaccagttttagccaacatagcatagtactctatttcagatttcctcaaagctgggcagttgttagcgagaatgaccaatttcgctttgccttgtctgatcatcttcagagtctgcttgtaccccaggacgtacttcccacttttcataacgagttggagcctagagttgatcgactccagcgactttttcgtcttctt

SEQ ID NO: 2365 - DNA, 251 bp, Homo sapiens
cctcccaaagggttgggattacaggagtgagctactgcactgggccaacatgttaatttttttttttttttgagatggagtctcccaggcgggaatgcaatggtgcgatctcgacttcactgcaatcttcacctcccgggttcgagcgattctcccgcctcagcctcctgagtagctgggattacaggcgcctgccatcacgctcggctaatttttgtattttgagcagagatggagtttcaccatgttgg

SEQ ID NO: 2366 - DNA, 153 bp, Homo sapiens
ctgctgaggatgcctgtgcctctgcccgtaactatatatagagtatgctttcaaaacaatataggccgggtgtggtggctcacacctgtaatcccagcacttgtggaggccaaggcgggcggatcacgaggtcaagagattcagatcatctgg

SEQ ID NO: 2367 - DNA, 494 bp, Homo sapiens
ccacatcttgactaggtattgtctactctgaagacctttaatggcttccctctttcatctcctgagtatgtaacttgcaatgggcagctatccagtgacttgttctgagtaagtgtgttcattaatgtttatttagctctgaagcaagagtgatatactccaggacttagaatagtgcctaaagtgctgcagccaaagacagagcggaactatgaaaagtgggcttggagatggcaggagagcttgtcattgagcctggcaatttagcaaactgatgctgaggatgattgaggtgggtctacctcatctctgaaaattctggaaggaatggaggagtctcaacatgtgtttctgacacaagatccgtggtttgtactcaaagcccagaatccccaagtgcctgcttttgatgatgtctacagaaaatgctggctgagctgaacacatttgcccaattccaggtgtgcacagaaaaccgagaatattcaaaattc

SEQ ID NO: 2368 - DNA, 246 bp, Homo sapiens
caaggccgaggataaggagtggatgcccgtcaccaagttgggccgcttggtcaaggacatgaaaatcaagtccctggaggagatctatctcttctccctgcccattaaggaatcagagatcattgatttcttcctgggggcctctctcaaggatgaggttttgaagattatgccagtgcagaagcagacccgtgccggccagcgcaccaggttcaaggcatttgttgctatcggggactacaatgg

SEQ ID NO: 2369 - DNA, 259 bp, Homo sapiens
aaaaagccagtttgggtaaaatacttttactctgcctacagaacttcaggaagacttggttggtagggtgggagtggtttaggctatttgtaaatctaccacaaaaacaggtatatactttgaaaggagatgtcttggaacattggaatgttctcagatttctggttgttatgtgatcatgtgtggaagttattaactttaatgttttttgccacagcttttgcaacttaatactcaaatgagtaacatttgctgtttt

SEQ ID NO: 2370 - DNA, 208 bp, Homo sapiens
cctccggcactatgagcggcttcagcaccgaggagcgcgccgcgcccttctccctggagtaccgagtcttcctcaaaaatgagaaaggacaatatatatctccatttcatgatattccaatttatgcagataaggatgtgtttcacatggtagttgaagtaccacgctggtctaatgcaaaaatggagattgctacaaaggacccttt

SEQ ID NO: 2371 - DNA, 184 bp, Homo sapiens
cctactggctatgcagctacttggactcccgttcaggtgcagagaaccgcacaactcagggttagctctcagggtcttctctggctcctcagtcccactaatgcagagagaaccctggctactcggaaacggctgtcctggggctaatccactgctaattccgttagttcctgtcaagcactgg

SEQ ID NO: 2372 - DNA, 513 bp, Homo sapiens
ctgggagaactacacctttgtgcacatagatttatatattaatttgtagaaaatattttctttatatatttccttaccatacaaggtgccttgttcatcaggaaaacttttgttttgtattttgacaagaaaggcaccttcagagtttctttttaagtatagttgacaagtgtataaatgttacacttactttcagagttctttttagatctaaagaagtcagttcaaaaatggaaatcaacaatgttaggagaaatctgaattctgttaagttagtaagtattatgtatagcatctgtttttaaccatttccattcttatccctagtgtatcagttgatcacactaagaaagcttaaagattgagcatttgaaataaatgctctttataaatgattagatttttgaagggatattgaaatcattgcgctgtgatttcatctgtgatgtgaaaaatcaatttattatccttggtgctttcccccccaccaatgcacaaataattgtgaacagc

SEQ ID NO: 2373 - DNA, 240 bp, Homo sapiens
cctggatcttctttactggggcctgcccctcggggtacagtgcattaatgagctcacatagcaccgtgccatccttgagccagttctggaagttctcgcgtccaggctggggccggcccacatcctttcggcactgggtggtgatccactggatcaggatctgctccagatctgcatcatattgtttctcaatcttctgctgcacctcccgactcaggccatatgcaggtcccctgttgg

SEQ ID NO: 2374 - DNA, 195 bp, Homo sapiens
atgaagggaggtggagttatcctcttatagtacagtggcctgttatctttttaatgaatatatacaagccaacatccaatttctattattacaattagggttcttgtagctgtttatgttaatatggagaagaaaactatattggctgattttttctgatcttaaagcagaatgccttttctttttttgcttcag

SEQ ID NO: 2375 - DNA, 223 bp, Homo sapiens
ccttctgttccagcagcccgacctggactctgccctccagatcgccagagcagagatcataaccaaggagagagaggtctcagaatggaaagataaatatgaagaaagcaggcgggaagtgatggaaatgaggaaaatagtggccgagtatgagaagaccatcgctcagatgatagaggacgaacagagagagaagtcagtctcccaccagacggtgcagcag

SEQ ID NO: 2376 - DNA, 553 bp, Homo sapiens
gtcatgccctacgttggtataatcacatcaagtcttacgaaaaggaaaaggccagcctgccaggagtgaagaaagctttgggcaaatatggtcctgccgatgtggaagacactacaggaagtggagctacagatagtaaggatgatgatgacattgacctctttggatctgatgatgaggaggaaagtgaagaagcaaagaggctaagggaagaacgtcttgcacaatatgaatcaaagaaagccaaaaaacctgcacttgttgccaagtcttccatcttactagatgtgaaaccttgggatgatgagacagatatggcgaaattagaggagtgcgtcagaagcattcaagcagacggcttagtctggggctcatctaaactagttccagtgggatacggaattaagaaacttcaaatacagtgtgtagttgaagatgataaagttggaacagatatgctggaggagcagatcactgcttttgaggactatgtgcagtccatggatgtggctgctttcacaagatctaaaatccatcctggatcatggcattt

SEQ ID NO: 2377 - DNA, 574 bp, Homo sapiens
  misc_feature 503: n = A,T,C or G
cctcaacagggacaagtggctggccttaaaaacacacagatgactggaaatgatgtgtggcctcagtccctgtttcccagaattttactggcaaaggagttagcattcatttttggcttaagaaaaatcgagaatgtaggtttagaactgcacccagcctcatgcaccgcggggccagggctgcagatcctctgccacccctccctcttttcttggacttgatgagtccccgaggctcaaagccatgggggtgctaggaggactgtcacagaccgaggcgctgcaggagctgctctgcctggacaaaccttcaagcaggaccagggcaggtatgaaatgtcttctgaagagtgtgaaatgagcaatgtacagtccattccctcttggggaaagcatgcacgtgtggagcctggtggtgtgctgtctcctgggccaccatccgcccccagctcttcatatgggcttgtacaacaaggtggtgacgtacttcttcttgtaccggntgggttgcgctgagcaccatcactccatccttgatagacagcgcgtataggtggttcagcatgacgtgatt

SEQ ID NO: 2378 - DNA, 555 bp, Homo sapiens
aaaaaagcacaacttgtttaggcacacagaggttaagtgacttacacaaatccacccaggattgtgattggcacggtctaatctactgaaaaatataaggccaggcaattatatagatatcttttaacaagttagtaaaatagtggggacttttctggctaaaaattgtaattaaatggtatgttactctgttataactaaacaaacaaaaaatctagaacaagaacttcttgctagttatgggtaatataaatacagagtaaggtgaaggaggactgtatgtatatttttccaacttgagaagatactagaaaggaaattaaaaattatttgaaccaattaaccagccctaaagaagtactctgctttgtatgaactaaaatatccaacaaagaaataaaataggcattgcccagcttcctttaatgtctcaactagtaaagtaaaataaacaatattcaaaggcagaccaaaccatttctaatctaaatatatcttcttgcttattaaaatgacacacatacgaagcctctaaacacgatctaccatgtcttt

SEQ ID NO: 2379 - DNA, 589 bp, Homo sapiens
aaaaacttttcacttatccatcatataacatcaaatgtacctgtaatcccaagtatgattcttttgagaaggaaaaaagtcagatcaaatacatcattaaggaaaaacatgcacactaaatagactatgaactctactgggacaaagaccattattttgtgtattttttcattccccaattcctgacaggattctcagaatcgtttcttcatgaatagcaaattgacttattggttaaattagcaactacagagctgcctaacaacagtacaaaataaatgaataattcaccagaaactagctctagatactaattttaattactttgcagcaacataatttagtaccaaatgtttaacaagtacccattataattactaaactgtgaagtcactattatttgtatctgaccagctatacaaaactcatcaatttttcttttgaaaaaaggtagtaaaaatcgcaaacgataaagaagacactactcattaaaagtcatgtttactaatctagcaccataattccagtcttagaacctcccatgcagttggaaagggattatgggaagaggtgagtatgttggaaatgt

SEQ ID NO: 2380 - DNA, 125 bp, Homo sapiens
aaagctctccatatgtctagttctgaggtgaagagattaaaaatagggagagcctggtagggagtgaagattcaaaatgcattgctagatctcacaccggttatatttcctctctaagatctcag

SEQ ID NO: 2381 - DNA, 219 bp, Homo sapiens
ccatcttgttattgagtaagaaaataaagcatggacatcatgaaaataacagatgttacccaaactcatcttctaaaatctgtgcatttccatggtggctgacacacttgtcatgtggtctgttagtgtttgccaagaaccattgcaaataaattgaacatcaaagatccaagtttgtactatccctaaagactggagataagcattggaggctctttt

SEQ ID NO: 2382 - DNA, 328 bp, Homo sapiens
cacgagttcatcgaggaaaaggaaaacagattgctccaattgtgtcagcgaactatggctcttcctgtaggacgaggaatgtttaccttgttttcgtaccatcctgttccaacagagccattgcctattcctaaattgaatctgactgggcgtgcccctcctcggaacacaacagtagaccttaatagtggaaacatcgatgtgcctcccaacatgacaagctgggccagctttcataatggtgtggctgctggcctgaagatagctcctgcctcccagatcgactcagcttggattgtttacaataagcccaagcatgctgagttgg

SEQ ID NO: 2383 - DNA, 563 bp, Homo sapiens
ccagcagttccgcaatacacaaactggcccgtgtgaatgccctcggcggcaatgaacagctccgtccgcttcttaaaccgatacggatcccggaagaccaccttggcgaggggcgcgccgcggcccgggtcgtggatgatgtccttgacgatgcccttgatgtagccgtgccgctcagcgaaatccacggcgcgcaggcgcgcagcgcctttacggtgcttcacgtgcgcgcggaacacagacccggcgcccttcctctgtccacggatcacacggcccatggcgacgggtcctgttcaccagcgacctgcccgggcggccgcccgggcaggtctgaggaatgtaactttggtcaagttattatgatgtgtttgggcttagttttctcattggtaaaatgtgggtgctggattggatcttaaagatcccttccagctctgaaatgctgattgtacagtatattcttcccagattgactcactgtgcaatctttacaatactttttatcttttcacttttgacataggtaatgttgttgagcagttgagcaatgttcagtccag

SEQ ID NO: 2384 - DNA, 307 bp, Homo sapiens; identical to SEQ ID NO: 1851

SEQ ID NO: 2385 - DNA, 135 bp, Homo sapiens
gtggagtgggcagaggtgcaagagagggatgtactgaagcttcttcccgtcctgccacagacacttcccctgccttcccaccctgacccggcagaacccaccaagtgcctgtgtgcagcctcctgtgcctcaccc

SEQ ID NO: 2386 - DNA, 114 bp, Homo sapiens
ccatgaagttcctccgggcctctgaagaacacctgaagcagcactacattgacctgaaagaccgaccattcttccctgggctggtgaagtacatgaactcagggccggttgtgg

SEQ ID NO: 2387 - DNA, 623 bp, Homo sapiens
  misc_feature 591: n = A,T,C or G
cctgtccagtctttgaaaacatcaagagatacttcaccctcaagtggttcagcagtttcttcatcaaaggtgttagacaaacccagtaggctaactgaaaaggaacttgctgaggctgcaagcaagtgggctgctgaaaagctagagaaatcagatgaaagtaacttgcctgaaatttctgagtatgaggcgggatccacagcaccattgtttactgaccagccagaggaacctgagtcaaacacaacacatgggatagaattatttgaagatagtcagctaaccactcgctctaaagcaatagcatcaaaaaccaaagagattgaacaggtttaccgacaagactgtgaaactttcgggatggtggtgaaaatgctgattgaaaaagatccttcattagaaaagtctatacagtttgcattgaggcagaatttacatgaaataggtgagcggtgtgttgaagaactcaagcatttcattgcagagtatgatacttccactcaagattttggagagcctttttagatttttctgctcaggctaaaaaaaaaaaaaaacagtttctaaaaattttttttcctggattgkgtnaatccttaatatatggaatttttgkgatgcag

SEQ ID NO: 2388 - DNA, 260 bp, Homo sapiens
cctgagacactgtgcctggccttaaacacaaatcttaattcattcttacaattattctgaggttacaaaaatggaaggggaagaaaaatggcaagtaggtaggctgacttcggcttcattatttggaaggacagtttgctcggttaaaacacactactgcttacaaaggccaagacgacagaaaaatacagacttacataaatagattttatatgtgacagcagtttgaatggagactttttcaatgcaatgagaaacag

SEQ ID NO: 2389 - DNA, 308 bp, Homo sapiens
gggagagggagtgaagagcctgccctcctatatggattcttcagggccctccacatctgaggtggctcattcccatcacacacagattgtcctggtgttcatttcaaggccagtgttcagcagcagcgtttggaaagcaggttctgtgggaccccccgccccgccccccgcactccttcatagcagcagtagtggcttctccatcctgttttctgcaacattctatacaaaactgtgctgtgaccttgcggtaggccacgacaaccgcgtgagctgcctcggggtcaccgacgatggcatggctgtgg

SEQ ID NO: 2390 - DNA, 281 bp, Homo sapiens
ccatcctagagaaaattaaaaagaaccagaggcaagattacttaaatggtgcagtgtctggctcggtgcaggccactgaccggctgatgaaggagctcagggatatataccgatcacagagtttcaaaggcggaaactatgcagtcgaactcgtgaatgacagtctgtatgattggaatgtcaaactcctcaaagttgaccaggacagcgctttgcacaacgatctccagatcctcaaagagaaagaaggagccgacttcattctacttaacttttccttt

SEQ ID NO: 2391 - DNA, 363 bp, Homo sapiens
cctgtttggctccgaagcctatatgtgcctggatcctctgccacgggttaaattttcaggtgaagagtgaggttgtcatggcctcagctatgcttcctggctctccctcaagagtgcagccttggctagagaactcacagctctgggaaaaagaggagcagacagggttccctgggcccagtctcagcccagccactgatgctggatgaccttggcctgaccctggtctggtctcagaatcacttttcccatctgtaaaattgagatgaattttggtgttgaaagttcttcctggagcagatgtcctagaaggttttaggaatagtgacagagtcaggccaccccaagggccatgggagccag

SEQ ID NO: 2392 - DNA, 327 bp, Homo sapiens
aaacctggattagtaaggaaagtggtaacacctttggaaacacagaagggaaatcaggttttggggaaagatgtggagttttgatctggacatgttaactttgctgctcaggcaaggatttatttaagagcgagaagcaccttgcccacggatttcccctgtatcacatgaaggaaggcatcattgacctcgtccagcttgaaaaccattctgacatatagctggatgcacccttgctggcagtactgaagcactgaagataggctcttggagaagacgggaaagttcatatctttgtattgaccacagtacaggcccatagcagag

SEQ ID NO: 2393 - DNA, 200 bp, Homo sapiens; identical to SEQ ID NO: 2176

SEQ ID NO: 2394 - DNA, 126 bp, Homo sapiens
aaaatccttcctctttcttcctcctctattctctaaataatgatggggctaagttatacccaaagctcactttacaaaatatttcctcagtactttgcagaaaacaccaaacaaaaatgccatttt

SEQ ID NO: 2395 - DNA, 442 bp, Homo sapiens
ctgtggccctgctcggattgagtatgcttgacaggctttgggataagaagggacaaggtgcttctagccctgtctcagtccgttatcactctgctgtagaagggggacatgccacatgtattagaaggcatctgctgtaacttccagtgcaagataattcaataactgatgtcccatttcattcagagcccttattgctcttatcaaaacagaagaaggctacatttgtgggagtgttgtcatattctctggccaactgttttgaaattcggtatctcactgagctaatctggaacaaacctctcacctcaggccagaaggggatgacctccatttgcttctctgagtagtttcctctgctgacattccaaatcccaccatcgattgtgcagcgctttggatttccttcagttctccaggtccacctggaaagtatagttgg

SEQ ID NO: 2396 - DNA, 261 bp, Homo sapiens
ccagtttaccctgaaaattcccgtgagaagggagatggcggtagcagcgacgtgcccacctgtgatttctggggcccttcttttctctttgctggttcagggactcaagtccaggccaatttgactcaaagtccaagggagaagagaaagaggggggtggggagtgccaaattcctttattttgccaattgtttctcagccaattcgtttttaatacttttttttttagccaattgattttttttggtggttgtttttttt

SEQ ID NO: 2397 - DNA, 222 bp, Homo sapiens
aaagttggtctaagttcctggatgacataggggtagatttccttatgaggtcctgctttgtccttaacaacctctaggatacgaactgtactagcaaaatcatttaaccgtctgcatgcccgcaaagcagcatcaatgattttgggctctggaaccatatcataggtaacaagtgtgtttatccccacggcggggccgggggtccgggcggagtgcaggagg

SEQ ID NO: 2398 - DNA, 322 bp, Homo sapiens
ccttgaccttttcagcaagtgggaaggtgtaatccgtctccacagacaaggccaggactcgtttgtacccgttgatgatagaatggggtactgatgcaacagttgggtagccaatctgcagacagacactggcaacattgcggacaccctccaggaagcgagaatgcagagtttcctctgtgatatcaagcacttcagggttgtagatgctgccattgtcgaacacctgctggatgaccagcccaaaggagaagggggagatgttgagcatgttcagcagcgtggcttcgctggctcccactttgtctccagtcttgatcag

SEQ ID NO: 2399 - DNA, 178 bp, Homo sapiens
cctgggcgatggagcgaaactgtctcttaaaaaatggcagggagttggggagctgggcaggtgcagtggctcatgtctgtaatcccaatactctgggaggccaagatgggaggatcacttgagcccaggagtttgagaccagcctgggtaacacagggagaccccgtctcaaatattt

SEQ ID NO: 2400 - DNA, 269 bp, Homo sapiens
ctggccgcctggtgctcgctggtcctgtccttctgccgcctgcacaaacagtccagcatgacggtgatggaagctcaggagagcccgctcttcaacaacgtcaagctacagcgaaagcttcctgtggagtcgatccagattgtattagaggaactgaggaagaaagggaacctcgagtggttggataagagcaagtccagcttcctgatcatgtggcggaggccagaagaatgggggaaactcatctatcagtgggtttccaggagtgg

SEQ ID NO: 2401 - DNA, 428 bp, Homo sapiens
ctgatgaagaacacgggtgtgatccttgccaatgacgccaatgctgagcggctcaagagtgttgtgggcaacttgcatcggctgggagtcaccaacaccattatcagccactatgatgggcgccagttccccaaggtggtggggggctttgaccgagtactgctggatgctccctgcagtggcactggggtcatctccaaggatccagccgtgaagactaacaaggatgagaaggacatcctgcgctgtgctcacctccagaaggagttgctcctgagtgctattgactctgtcaatgcgacctccaagacaggaggctacctggtttactgcacctgttctatcacagtagaagagaatgagtgggtggtagactatgctctgaaaaagaggaatgtgcgactggtgcccacgggcctagactttgg

SEQ ID NO: 2402 - DNA, 156 bp, Homo sapiens; identical to SEQ ID NO: 1999

SEQ ID NO: 2403 - DNA, 459 bp, Homo sapiens
ctcaccagtctcttcaccgacagcttagtcaaagaaggcattgcggcctcatttgctgtcaagcttttcaaagcatggatggcagaaaaagatgccaactctgttacctcgtctttgagaaaagccaacttagacaagaggctgcttgaactctttccagttaacagacagagtgtggatcattttgctaaatacttcactgacgcaggtcttaaggagctttccgacttcctccgagtccagcagtccctgggcaccaggaaggaactgcagaaggagctccaggagcgtctttctcaggaatgcccgatcaaggaggtggtgctttatgtcaaagaagaaatgaagaggaatgatcttccagaagcagcagtgattggtcttctgtggacatgtataatgaacgctgttgagtggaacaagaaggaagaacttgttgcagagcaggctctgaagcac

SEQ ID NO: 2404 - DNA, 355 bp, Homo sapiens
ctgtatgaagaggagatccgggggctgcagtcccagatctcggacacatctgtggtgctgtccatggacaacagccgctccctggacatggacagcatcattgctgaggtcaaggcacagtacgaggatattgccaaccgcagccgggctgaggctgagagcatgtaccagatcaagtatgaggagctgcagagcctggctgggaagcacggggatgacctgcggcgcacaaagactgagatctctgagatgaaccggaacatcagccggctccaggctgagattgagggcctcaaaggccagagggcttccctggaggccgccattgcagatgccgagcagcgtggagagctgg

SEQ ID NO: 2405 - DNA, 244 bp, Homo sapiens; identical to SEQ ID NO: 1697

SEQ ID NO: 2406 - DNA, 415 bp, Homo sapiens
ccaagaagcagtggccttattgcatcccaaaccacgcctcttgaccaggctgcctcccttgtggcagcaacggcacagctaattctactcacagtgcttttaagtgaaaatggtcgagaaagaggcaccaggaagccgtcctggcgcctggcagtccgtgggacgggatggttctggctgtttgagattctcaaaggagcgagcatgtcgtggacacacacagactatttttagattttcttttgccttttgcaaccaggaacagcaaatgcaaaaactctttgagagggtaggagggtgggaaggaaacaaccatgtcatttcagaagttagtttgtatatattattataatcttataattgttctcagaatcccttaacagttgtatttaacagaaattgtatattgtaattt

SEQ ID NO: 2407 - DNA, 293 bp, Homo sapiens
aaaataaatagcaaattcacatctagaataaataggtctgcctaatttgcattaattgtgcctgatatcatacaggcacaatctgtcattccatgagataactggaaaagtctccaaagtcagagttcaaacctgcaggactgaaaacacacagaagcactgtcgcaggttgggttccccgaaagcagatactgaggtggagaatggcgtgcaggaaggttcataggacagtgctgtgggctgagccggctgggtacaggcttgtcagggagaggcactgggctgtaatgtgg

SEQ ID NO: 2408 - DNA, 382 bp, Homo sapiens
ccaggctggagtgctgtggtgtgatcacagccaactcactgcagcctcaaccttccaggcccaagcaatcttcccacctcagccttctgagtagctggtactacaggtgggcgccatagtgcccggctaattttgttatttttattttgtagagacgggggtctcactgtgttgccgaggctggtctcaaactcctgggttcaagcaatcctcccgctttggccttccaaagtactgggattacaagcatgagccactgtgcctggccctatttacaacctttatatatcccacttagggtgaatatttgtgaatactcacacatttctgctatagaaacattgtttgactacgggggcatacaatatatctcacctttttt

SEQ ID NO: 2409 - DNA, 367 bp, Homo sapiens
aaagaagctaacagagcttggaaccgtggacccaaagaacaaataccaggaactgatcaacgacattgccagggatattcggaatcagcggaggtaccgacagaggagaaaggccgaactagtgaaactgcaacagacatacgctgctctgaactctaaggccaccttttatggggagcaggtggattactataaaagctatatcaaaacctgcttggataacttagccagcaagggcaaagtctccaaaaagcctagggaaatgaaaggaaagaaaagcaaaaagatttctctgaaatatacagcagcaagactacatgaaaaaggagttcttctggaaattgaggacctgcaagtgaatcagttt

SEQ ID NO: 2410 - DNA, 182 bp, Homo sapiens
cctcgcttagttgtactggattctcagggagccctctgtggccttttgctttgcgtgctatttcccttgtaccagagggcggcaccgtggaaattctgttttccctgtagcatattgtgttggattgcattactggcagagaaaggacaaggtgccattcaagtcctagggtgggcttccag

SEQ ID NO: 2411 - DNA, 409 bp, Homo sapiens
ctgtccaatggcaacaggaccctcactctattcaatgtcacaagaaatgacgcaagagcctatgtatgtggaatccagaactcagtgagtgcaaaccgcagtgacccagtcaccctggatgtcctctatgggccggacacccccatcatttcccccccagactcgtcttacctttcgggagcgaacctcaacctctcctgccactcggcctctaacccatccccgcagtattcttggcgtatcaatgggataccgcagcaacacacacaagttctctttatcgccaaaattacgccaaataataacgggacctatgcctgttttgtctctaacttggctactggccgcaataattccatagtcaagagcatcacagtctctgcatctggaacttctcctggtctctcag

SEQ ID NO: 2412 - DNA, 199 bp, Homo sapiens
ctggaagtaacaacatctacaatcagatagcagaactatggaaaccctggcttagtaatgagtccatcgctctcttcaaaaaaggtgccttctactgtgagaagctgccgggtcccagcggggctgggcgaattgtggtcctcaacaccaatctgtactataccagcaatgcgctgacagcagacatggcggaccctgg

SEQ ID NO: 2413 - DNA, 180 bp, Homo sapiens
ccacgctgatgagctgtacccgctcagtgtattcctgggatattgtcgtccagagagttgggtccaaactcttctttgacaagagagacaactctgactttgacctcctgacagtgagtgagactgccaatgagccccctcaagatgaaggtaattccttcaattcaccccgcaacctgg

SEQ ID NO: 2414 - DNA, 510 bp, Homo sapiens
aaataatataccaactctggaactcatctcctctcccttagtcccaggtgcattgttgttgctgtttgtgtagtgattttctaggactaagtctgtaaagtctgtattctttgttgtgtgtgatcactgaaggatctgctcagttagtttagtggctggctaatgactgaacagagatttccttaaattccttgcaagtttcccaacctttgcagaggggctgtgtgagtttgggggcatgtatttgatgcttcaacaggcaatttatgactttgccttagctttcacactctgcttacacagagcctcaagatcagccagaggtgagagattaggaccttctcaggtctttcctgggcatgtgcacagctcttctcatgcatgtgactctctaggaatattttagagcttttctataccccctatgggattttgcttttaagttttttgggcagccccttgtaagcttcaattaatattgctatttccagcaactatgatgttaaacag

SEQ ID NO: 2415 - DNA, 245 bp, Homo sapiens
cctccaagtcgaggtctgctttgctccagctcttcctccagagccttctgcaggctggtcttcagtcgctctgcccccacttcctggcactggaagagcagagtgctagtgcctggcaggcccggctcctgcacggtgatggacaggatggagttgtaggaacatgtgttgagcgccacattcatggcctggatgctgtctaggcggtaagagtccagctcctccttggtctcaatgtccagcag

SEQ ID NO: 2416 - DNA, 194 bp, Homo sapiens
ctgaaacaaattcatatcctgactaggtctgttttctcttaggtatttggatggtccctctctgctgcgacttctgcacagatgaggcactgataatggcctgcaggtcactcacaatcctagctccacatcactccatggtttgataacctagaaccacgttatgatttccatttataatgccctaagaacag

SEQ ID NO: 2417 - DNA, 259 bp, Homo sapiens
  misc_feature 56: n = A,T,C or G
ataagggcactgagcccttcccaggctggatactaagcacaaagcccatarcactngggctctgatggctgctccactcggttacagaatcacagccctcatgatcattctmastgagggctytggattgasagggaggccctgggaggagagaakggggcaragtcttccctaccaagtttctacacccccgccaggctgcccatcasggcccagggagccmccagaggactytattcggaccaagsagarctyacag

SEQ ID NO: 2418 - DNA, 228 bp, Homo sapiens
aaagaatgagccgatattggcttagtgctcactaggggacatgcacatggaagctcacctctaagaaagggctgggcagatggatttattttttcccacctgtgaatatgtaaaacaaaaccattatctttgagggagtttttaataccaatgacagaacagagatttgtgtgctcatcttaagagccagagccatataagcatcttgggaaagcaagtttgaaccag

SEQ ID NO: 2419 - DNA, 294 bp, Homo sapiens
ccatgacagcagctactgcttcacatagcagcatacgccacatgttcaccttcaatatttttccagtctgtctatctttctccacacagtagcagctatcatagaactctgtgaaagcagttgccagctcatatatataatcacagagagtgtggagaaataagtcatctaaaatcttttgcagaatctcagggaaccgtaaaatgcaccggcctagtttccattccttctcatgatccaaaagaatcttggtttctcgagcagctttttggagcatttcttcatcaatattgg

SEQ ID NO: 2420 - DNA, 397 bp, Homo sapiens
ctgcgcaaggaggagcggagctgggagcagaagctggaggagatgcgcaagaaggagaagagcatgccctggaacgtggacacgctcagcaaagacggcttcagcaagagcatggtaaataccaagcccgagaagacggaggaggactcagaggaggtgagggagcagaaacacaagaccttcgtggaaaaatacgagaaacagatcaagcactttggcatgcttcgccgctgggatgacagccaaaagtacctgtcagacaacgtccacctggtgtgcgaggagacagccaattacctggtcatttggtgcattgacctagaggtggaggagaaatgtgcactcatggagcaggtggcccaccagacaatcgtcatgcaatttatcctggagctgg

SEQ ID NO: 2421 - DNA, 443 bp, Homo sapiens
aaagttctttttagaaaataacataagccaaagactcaagtgtaaatatgtctatatggagaaagcacattatatttattggttacttacattccttttttgatggctaaaatactaccaccacacaatcatcttttttttcctgaagaaagctttttctttagctaaaatcaattgtaaacgatttttgtagattattttttgtatgttttagtgtaagtagaagataaactttttattcataaaccaggaagcaatgttctttatagtgattctcttgtgtacatgcttgtgaattaaatttgtgtaaaatcccttggcaattgggtcttttaatataggaccaaattaaaacattttgctgaatatgtatagtttttcacaatttcattaggtaaataatggtttggtgatcatacatgagaaatgtacacattaaaagg

SEQ ID NO: 2422 - DNA, 162 bp, Homo sapiens
ccagtttccttaatttatgaaggcatcatgtcactgcaaagccgttgcagataaactttgtattttaatttgctttggtgatgattactgtattgacatcatcatgccttccaaattgtgggtggttctgtgggcgcatcaataaaagccgtccttgatttt

SEQ ID NO: 2423 - DNA, 512 bp, Homo sapiens
cctgacattcctgtcttcttatattaataagaaaaataaaacaaaatagtggtaaagtgttgggacggtaaaaatttttgggggtggtatggagagacaatgggcaatgtttctcagggctgcttctagcaggattaggggcggcatgggaacctagagtgggagagattaagctgaaggaagattttgtggtaaggggtgatattatgggactgttagaagaaacatttgtcatttagaattattggtgatggcctggatacggttttgtatgaattgaaaaactaaaccgagtaagagaaggagaaaaacaggtattaaaggtctaagaattgggaggacctaggacatctataagagtgcctaaggaaattcagcatagtcctgtcagcaaagattatttatttacttcaagagttaagagtggcagtctggggatagcaccaggagatatcagacctgcccgggcggccgcccgggcaggtaaagaagtcctctgtaaacacgatccc

SEQ ID NO: 2424 - DNA, 215 bp, Homo sapiens
ctgtcctggagaccgaagtgccatcacaccgggcggcctgcggcttggggccccagccttaacttctcgacagttccgtgaggatgacttccggagagttgtggactttatagatgaaggggtcaacattggcttagaggtgaagagcaagactgccaagctccaggatttcaaatccttcctgcttaaggactcagaaacaagtcagcgtctgg

SEQ ID NO: 2425 - DNA, 252 bp, Homo sapiens; identical to SEQ ID NO: 2278

SEQ ID NO: 2426 - DNA, 151 bp, Homo sapiens
ctggagccgttctccggtgtaaagaggagtcaaagagataggattaaagaggtgaagattaagatcttggtggcattcagggattggcacttctacaagaaatcactgaagggagtaatgtgacattacttttcacttcaggatggacctg

SEQ ID NO: 2427 - DNA, 220 bp, Homo sapiens
ctgcttccaaaatccctatgctattacagtgggaattacatcatttaaaaagcctgattattccaggcttctaatctttcatataaaactgcctttgttttgctgctttgttcaactgagaggcccaggaaagcggggagggtccctgatcagggcaggaggccacctcagaagcccaggcccaccagtgcccaagcacatgtcagggctcagaacaagg

SEQ ID NO: 2428 - DNA, 152 bp, Homo sapiens
ctgcacatcactcaggatttcaatggtgcccctggagattttagtggtgatacctaaagcctggaaaaaggaggtcttctcgggcccgagaccagtgttctgggctggcacagtgacttcacatggggcaatggcaccagcacgggcagcag

SEQ ID NO: 2429 - DNA, 389 bp, Homo sapiens
ctgctctaggggcctaaccaccatggataacctggtctctaaaggaaaatacattccaggttgcaaacaaccaactgacaaccttttggaatatgatctccttatacactggggctgcctgtgcctaaacacagtagatttccctcctgtgcgtatttcatcagccccacttccaataagtaacattaagtaaattagggattgacagtattctgtgttacaataactagagaacagttctaagtccaaagtgtggaactggcactgtttactagtatagagatcctacctaccaaaggaaaacgtgctgctccccatgcctagggtatagtattctttaatctactaatttagcagaaaaacttccatagcacttgactgtgctgttt

SEQ ID NO: 2430 - DNA, 460 bp, Homo sapiens
ctgacaggtgtacttaaaaatactgaattgacagctacattgaatgcagggtttcccagggtagttcttattttgtcacttactccaattacattcaaggtcgttatgcctcatctttttcctgagctgtggcagctctaactggggcacccagagagatacataccaggtaatctccacttctacttttctggtagcttggccctggcaaaatgagccccacaatctagaaagtaggatgctaaacaaagttgaatcaacatatctttttagaaaatatcaggttagagaatactcctgaggacctgtttctaaccagagttgacaaatgtgaaaaatgcatcagctagacagcagtcatgtgaacacagcccggaactgcaagtcaaggaaatgggttctgggcctgccttcccaggtaaccaaaaccattattcaaaagcaactactgaaatgccag

SEQ ID NO: 2431 - DNA, 325 bp, Homo sapiens
ccacatcagtaaccgattccctgggcctccagcccggccttccagccatgggcctggctgcctgaagaggaaggaaaccacccccaacttggttgctggggacttgaagacttcagtgtgatctttacctaggggagggacagagctgggctggtggagcccatgggtgctgcctgatggtgctgtggggtgggtgctcatgtgccaagtcctgcttggcagtggagacctggggcccttaaagtgttacaacagcctgcagcaagggaagttccccgtagcctcagtcttctctgggcttgaggccgctccttggcaggcattt

SEQ ID NO: 2432 - DNA, 315 bp, Homo sapiens
ccgcccacaaccaccacgcacacaactactacaattccgcctagggccacaaggccttccctgttttccccccaagggaggctgctgctgctcttggctggacccagccaggcccagccgaccccctctccctgcatggcatcctccagcccctgtagaactcaacctctacagggttagagtttggagagagcagactggcggggggcccattggggggaaggggaccctccgctctgtagtgctacagggtccaacatagagccgggtgtccccaacagcgcccaaaggacgcactgagcaacgctattccag

SEQ ID NO: 2433 - DNA, 183 bp, Homo sapiens
aaaggagccaatgaggccaccaaaaccctcaacaggggcatctctgagttcatcgtgatggctgcagacgccgagccactggagatcattctgcacctgccgctgctgtgtgaagacaagaatgtgccctacgtgtttgtgcgctccaagcaggccctggggagagcctgtggggtctccagg

SEQ ID NO: 2434 - DNA, 277 bp, Homo sapiens
ctgcgcgtcgccaaagtgacaggcggtgcggcctccaagctctctaagatccgagtcgtccggaaatccattgcccgtgttctcacagttattaaccagactcagaaagaaaacctcaggaaattctacaagggcaagaagtacaagcccctggatctgcggcctaagaaggcacgtgccatgcgccgccggctcaacaagcacgaggagaacctgaagaccaagaagcagcagcggaaggagcggctgtacccgctgcggaagtacgcggtcaagg

SEQ ID NO: 2435 - DNA, 245 bp, Homo sapiens
ccacgtcacaacctctgatctcagaccgtgcatgccttgtcctcttaagacaactcctgtggcaccgtttctccctccacagggccaaagccatagtgtccggtcccaaggacaaggctcttccagtgctaggagaggtatgagcagcctctcacctgtgagctgtggggatcacaaggctgcctgcctcagtcttggagtcctgttgggtgaatgaggcagatgggaaagagcctcacccgcag

SEQ ID NO: 2436 - DNA, 216 bp, Homo sapiens; identical to SEQ ID NO: 2283

SEQ ID NO: 2437 - DNA, 226 bp, Homo sapiens
ctgtgcaagggctttacaaaaactgtgccaggacttcccatgaggctggattgcttgattcatgttttatgagccccacaatactgaagctccttttccagggacttggcataggcagtcaattccacatttgggataggtcctctctggaagtgaatgtcaggcagtgacatccaagtttctgcatgcagtgggttaacagccatgtttagggggaacatggttt

SEQ ID NO: 2438 - DNA, 372 bp, Homo sapiens
ccaaagaggagggggaaaaagccaccaactctagattcatttttaaggagatcaggaggagaggaagaaaaatagaaacgcgtatgtgaaatggtaatgatatacaacatggagaaaaaaataaacatcgtggaacctgctagcaatttccaccaatttccaccaaagcagtgaaccccttaactgacagaaattcagtacaatatacacattaattaacaactccaccattactagggctgctgttgaaagccaaaaaattaactacaatattgaaaaacagaatgcttacaatatctgagaaaaatagagtgaaaaggcaatgttagctaagctcttagctacatccactcttaatggcccccagtattt

SEQ ID NO: 2439 - DNA, 271 bp, Homo sapiens
ctgagctgaaattggaataatgggagctccctctgctactgtaccttggacaaatgcaaggatctgctcgtattgttctttagcctgactttcttttaccaaatcaattttattttgtagaatcaaaatatgcttcagtttcatgatctctatagcagccaggtgttccgatgtctgaggctgagggcaagattcattaccagctatcaacagaagagctgcatccatcactgctgcaccgttcagcatagtagccatcaaaatatcgtgg

SEQ ID NO: 2440 - DNA, 119 bp, Homo sapiens
aggcgacccagacaattataccctagccaaccccttaaacacccctccccacatcaagcccgaatgatatttcctattcgcctacacaattctcctagtttgttagggacggatcggag

SEQ ID NO: 2441 - DNA, 281 bp, Homo sapiens
cctgggttcctccagggacaggacagaggcttggtccacccacaagtcctctagaaacctctttggtcctatcagcctctgcccaaaggagaggctgccccgatgagagcctgctgactgaagcctgcacaacagcatccctgacagagtgacggaggcaccctgggagtgaggcacctcccaagtctactgggggaagagggcatcccttaccggtttatcaggtaaacctcttgaccccacgcagcaccagcccttctagtccccaggcacagcaccag

SEQ ID NO: 2442 - DNA, 262 bp, Homo sapiens
aaacagacaaaattcctaagagccgggcatgagctactcaagatttgttttgttgggttaaggtttctgacaaaagattctggtttaggcagatgcccctgacagttcaagtagcctcacggtggtagccagagcgctgtctacggcgaccgagaacacatggactggaagacagcctgccctagatcacccgtggcagtacatcttcaagctgccacattcaacatatgaccacagacatctttatagttccatcactggc

SEQ ID NO: 2443 - DNA, 214 bp, Homo sapiens
ccatcgtgagccttaaagcaccaaggaagctaaaggtttgccactttaagaagggaactgagatctgcaactacagctactccaacacgattctggctgtgaagctcaacaggcagaggctgatagtatgcctggaggagtccctgtacatccacaacattcgggacatgaaggtgctgcatacgatcagggagacgcctccaaaccctgcagg

SEQ ID NO: 2444 - DNA, 297 bp, Homo sapiens
ccagtgacacccacaggggaggttgggggcagacacccttctcttccggtacccttgaacatggtgtcagggtgtggctagctcgacggacaccgaacagctccacagggagggtagtgcccaaggctttttgcctcccctaccatgtcccgcacttcctgaatgcagctcaaaccaggagcagctcccccaggattctggcctgcttcacccctggagcaccaggccaggcggtgtctgtccttgagagccaggcccaggtctcacggtggcgtatgggcagctcctccccatagg

SEQ ID NO: 2445 - DNA, 291 bp, Homo sapiens
aaaataattgtcattatattgcttccatgtatgaataacacatatatatttttcataaatacaaataatcttacacacaaatgaaaatgcaagtattttacaggcagggccagtgtccagtgcatgaaggaagccctgccagaaaggatccaggaaaaacctataattcttgctttattcaatccagtgtcaaatcacatatgtcactcatggcctgagggggcttggtggggaattgaactatatccagtcacgggtgctggagtggaaattatctaatcaggtgcacag

SEQ ID NO: 2446 - DNA, 338 bp, Homo sapiens
ctgcgccgtatgtctgagtgactaaggggcagtcgtgagaggcagagtccaagatctcattggtcgtttccagactgccgtccagccggtgctgcttcatcagggcacactcgccgccctcctgggggtccaggttgtacatgtacaggtacccgtcggcggcacccaccaacaaccgcgggatcttctgaattgtggctagcgagcagatgtttttgtggccgcagaatggcaggcggaccgtggcgaaggctctgccctggttgaacatttctgtcacttgggaaggcaggtagctggtggaggccatgagcactttcccgaagtacccggtccag

SEQ ID NO: 2447 - DNA, 193 bp, Homo sapiens
aaatcaaactgtaaaacttaaaactgaaaaattttattggtaggatttatatctaagtttggttagccttagtttctcagacttgttgtctattatctgtaggtggaagaaatttaggaagcgaaatattacagtagtgcattggtgggtctcaatccttaacatatttgcacaattttatagcacaaacttt

SEQ ID NO: 2448 - DNA, 369 bp, Homo sapiens
ctgcagaatcctgccccttccaccccaaggggcacagcccggagatgaagcttattttaggatcacaagtgcacgctctggtagacggaggatgactttgtcagtcttctggctgaagggccttgtccaaagtcaggatcagaaataggtcagctcatcatgcttggctttgttggtctggtagttagataaggtcaagggcttgttttcatgagggagagattggaacactcgcaggtgtacgaagtcctcgtcgccgacgtgcaccttgatgaagtagtttgtccccgcgaccacctggctcttgaatgacacggccttaaacacagggaacttcttgttttctttctcttcaagctgggacctcac

SEQ ID NO: 2449 - DNA, 117 bp, Homo sapiens
aaataattttgtggtgctcctttttagcatttgatgaatacagaaatatcagccaaaaggacattgtggacagcataaaaggagaattatctgggcattttgaagacttactgttgg

SEQ ID NO: 2450 - DNA, 572 bp, Homo sapiens
ctggcattcctcgagctaacgcttcacgcactaatttcagtagtcacacaaaccaatcaggtggtagtgaactcaggcaaagggaggggcaacggtttggagcagcacatgtttgggaaaatggggctagaagtaatgttacagtgaggaatacaaaccaaagattagagccaataagattacgatctacttccaatagtcgaagccgttcaccaattcagagacagagtggcactgtttatcataattcccaaagggaaagtagaccagtacagcaaaccactagaagatctgttaggaggagaggtagaactcgagtctttttagagcaagatagagaacgagaacgcagaggtactgcatataccccattctctaattcaaggcttgtgtcaagaataacagtagaagaaggagaagaatccagcagatcctcaactgctgtacgacgacatccaacaatcacactggaccttcaagtgggaaggatccgtcctggagaaatagagatcgggatagtattgcaaatagaactcgatccagagtagggctagcagaaaatacagtcacta

SEQ ID NO: 2451 - DNA, 468 bp, Homo sapiens
  misc_feature 428: n = A,T,C or G
ctgaaaatgtgtggaatagggggcatagagcgtgtcccctgtctcttcaaaaccttgagtgatttcctcttgagagtaggctctgttctccacaccatagctcttcttcacgagttgaggtttacagaaagcatcctcaacaggataatccatggggtttcgttgctttgtgagcagccaaaactcgggactaacataagccaacaggaacacccagccattggcagccaaggcggagctgaggatggtgtcatcccacctgcggtcaaagtcaggaagcatgagcagggtgatccaggccacccagatggcaatggagaggagcatcgtgaggtagatgtgggccccatgtctcttccagcccgtgaaggaaccacagaaggtgaaggaggacatgaggaaggtcagcgccatcaagaagaggacgnaggtgagcaggaggacaaagtcttcattgcgacgaggagc

SEQ ID NO: 2452 - DNA, 562 bp, Homo sapiens
ccaatagaaatggaacaaagtatcttgctaggactctaaacaggttactgatgcatcacatcagagattgtttaccagagttgaaaacaagaataaatgttctagctgctcagtatcagtctcttctaaatagctacggtgaacccgtggatgataaaagtgctactttactccaacttattaccaaatttgccacagaatattgtaacactattgaaggaactgcaaaatatattgaaacttcggagctatgcggtggtgctagaatttgttatattttccatgagacttttgggcgaaccttagaatctgttgatccacttggtggccttaacactattgacattttgactgccattagaaatgctactggtcctcgtcctgctttatttgtgcctgaggtttcatttgagttactggtgaagcggcaaatcaaacgtctagaagagcccagcctccgctgtgtggaactggttcatgaggaaatgcaaaggatcattcagcactgtagcaattacagtacacaggaattgttacgatttcctaacttcatgatgccata

SEQ ID NO: 2453 - DNA, 87 bp, Homo sapiens
tgggaaaccacttggaagaccgagtgaacaaatttttgcggcgccagaatcaccctgaagccggggaggtttttgtccgagtggtgg

SEQ ID NO: 2454 - DNA, 274 bp, Homo sapiens
tgctcggcgacgtttccttcccctgcagagaccaaaaggtcaaggaaacaaagtacaaaatggatctgtacatcaaaaggatggattaaacgatgatgattttgaaccttacttgagtccacaggcaaggcccaataatgcatatactgccatgtcagattcctacttacccagttactacagtccctccattggcttctcctattctttgggtgaagctgcttggtctacggggggtgacacagccatgccctacttaacttcttatggacag

SEQ ID NO: 2455 - DNA, 178 bp, Homo sapiens; identical to SEQ ID NO: 1614

SEQ ID NO: 2456 - DNA, 318 bp, Homo sapiens
aaataaatacttagaacacgacttggctcctacaagcatctggactctaggtctcagtactggagtgtctcacccatgggccccacgcagggacgccacggttccctcccaccccgtgatcaagacacggaatcggctgccgatggttggatcgcaatgcgccccttttctagagccttccccggccatctacaggcaggatgcggctgggaaaaagacaactggaatttctcgaaggttgatggtccgcacggttgaggattctacgtggttctcttggttcccctggtgtgtgtgtgtgtgtggaggaggccgcgg

SEQ ID NO: 2457 - DNA, 389 bp, Homo sapiens
ctgtgatgagttgataccagagtatctcaattttatccgtggtgtggttgactctgaggatctgcccctgaacatctcccgagaaatgctccagcagagcaaaatcttgaaagtcattcgcaaaaacattgttaagaagtgccttgagctcttctctgagctggcagaagacaaggagaattacaagaaattctatgaggcattctctaaaaatctcaagcttggaatccacgaagactccactaaccgccgccgcctgtctgagctgctgcgctatcatacctcccagtctggagatgagatgacatctctgtcagagtatgtttctcgcatgaaggagacacagaagtccatctattacatcactggtgagagcaaagagcaggtgg

SEQ ID NO: 2458 - DNA, 332 bp, Homo sapiens
cctcagagtctgagtatagcctactccaattaagctagagttgttgacttttgcagaaatggaagcagtgggatccaactgatatttagctgcaatgccaaaacgagtgcagttggtacctgatgtccaagcaaggtttactgaagtgtcaagatcttcacaaactttctgataaattgatcctccaaattctgtcccatcattgacattagtgtgtagctggaagtccccagtcctgtagcccactgcaaagttattccttgtcagctttgatttggcactgtcaaaggtcatctggtagccagcaagccagccctcataaccaaagacag

SEQ ID NO: 2459 - DNA, 392 bp, Homo sapiens
ccacagtcccttccaaaataaacctacaggactttattctagcactgacctcttacagttatgccatcccttgaaataactttttaagaatgtcgattctgagtataaatcatggattgcactgagatatgcaaaacctacatatgtattatgaatcacaggaactaccacttcattctgagctatattatgttctcatttgaaaacacaccctagcaagcgtattttaacctatgttataaaggtagttcacactataacattcccaaggcatgttgcattacagttaagtgtttccaagtagtacaaattccctgagttaaatgtattttaattctaaaaatttgatgttgatcacttagggaaaaaaagaaaaattatgaccatgattt

SEQ ID NO: 2460 - DNA, 513 bp, Homo sapiens
ctgcagaggtcgctggtcagttcgtgattaaactaacccatgatgttgaattgaacctggactatgagaggtacaacagccaactgctttcatttgtgagggatctgaaccaatacagagcagacataaaggaaatgggcctgagtttacagtggctgtattctgctcgtggagacttcttccgtgctacttccagactaacaacagatttcgggaatgctgagaaaacagacagatttgtcatgaagaaactcaatgatcgtgtcatgagagtggagtatcacttcctctctccctacgtatctccaaaagagtctcctttccgacatgtcttctggggctccggctctcacacgctgccagctttactggagaacttgaaactgcgtaaacaaaataacggtgcttttaatgaaacgctgttcagaaaccagttggctctagctacttggactattcagggagctgcaaatgccctctctggtgacgtttgggacattgacaatgagtttt

SEQ ID NO: 2461 - DNA, 141 bp, Homo sapiens
ctgctgatcacagagctgacggtgcttggtgtgacccgggtgcccctgaggttaagagagcacagggctgggtgtgagcccccaggggtgcttaagaaggcagccagggcctgctccaggtccttctcactgaacccctgg

SEQ ID NO: 2462 - DNA, 288 bp, Homo sapiens
ccactggttgggctggttgagcagcttcacgatggctgggatgccatagttgagacgcacagagttctgggccatctcggcctcagggtggcggctagtgaggtggcgcagagcgcagacggcaggctccgtgatgtcgtccttgtcaccagcacgcaggatggcatggatgagagcctccacaccgctgktctgtgtcaccagcgtcttgttcttgctgttgttgcatgtcaggttggagagtgtgcccgtggcacaggtgaggacgytgacgtcatccacactcar

SEQ ID NO: 2463 - DNA, 179 bp, Homo sapiens
ccactcatgtggtcagcaggtcggcggagagactgggatggctgggcttctctctctgcctgcagtcctgagtctctccttcttcgtgtagtctctttcagtggcctggctggcagggtagctagacctctcacatgcagctcagagctcccaagagctcaaaagcagaaatggccagg

SEQ ID NO: 2464 - DNA, 510 bp, Homo sapiens
aaaaagcaagtttttacccacattggagcagaagctgaagcaggatcaaaaagtccttaagaaagctgggcttgcccactcgctgcagcacctccggggctctggaaatacctcaaagctgctccctgcaggccactctgtatcaggctctttgcttatgccagggcatgaagcctcatctaaagacccaaatcacagcacagctttgaaagtgatagagtcagacactcacaggacaaatacaccaaggagaaggaagggaagaaataaagaaatccaggacctggaggagagctttgtgcctgttgctgcacccccaggtcatccaagagagctgcagaagtactccagtgattctgagagccccagaggaactggcagtggtgcgttgccaagtggtcagaagctggaggagttgaaggcagaggagccagataacttcagcagcaaagtagtgcagaggggccgagagttctttgacagcaacgggaacttcctgtacagaatttg

SEQ ID NO: 2465 - DNA, 439 bp, Homo sapiens; identical to SEQ ID NO: 1955

SEQ ID NO: 2466 - DNA, 211 bp, Homo sapiens
cctcctgccatggtaggtgtcctgacaggaagagtccgatcacctttccttctgtccatttctctttggggaacaggataccagcgaaaattgagcttccagttgaacccaccataggtcatatcagagcctgccatgtactcaaaagtatcatcactgatcacatcgatgatgggacacaccactgttctcctgtcatgtttgatcctgg

SEQ ID NO: 2467 - DNA, 169 bp, Homo sapiens
ccagggacagcagggccgtgacgatggtgcagcctgcgcttgggccgtccttgggggtggcgccctcgggcacatgcaggtggatgtgtgaggtcaccaggtagtcattggcgggggcgtgctgcatgaggaaggctctggcgaaggtgtaggctatgcgggcgctctc

SEQ ID NO: 2468 - DNA, 258 bp, Homo sapiens
ccaaaaccaggctttgattgaaccaggatgaatgcgggtgttggaagtagaatatatatatacatataaaattggttgggagccacgtgtaccagtgtgtgttgatcttggcttgattcagtctgccttgtaacagaaactggcgatggaatatgagaggagccctctggaaagaaaaggacagaccctgtgctttcatgaaagtgaagatctggctgaaccagttccacaaggttactgtatacatagcctgagttt

SEQ ID NO: 2469 - DNA, 117 bp, Homo sapiens
ctgtccacgtcttcctgggagtcacaggccagctcgatctgccgcaggtccttgtagacgtttctctgctccgtgttgaagatggcgaaracgtgcttgttggacatgaagcccttc

SEQ ID NO: 2470 - DNA, 194 bp, Homo sapiens
cgctgagactaagttgtagaaattaacaaatgtgctgcttggttaaaatggctacactcatctgactcattctttattctattttagttggtttgtatcttgcctaaggtgcgtagtccaactcttggtattaccctcctaatagtcatactagtagtcatactccctggtgtagtgtattctctaaaagcttt

SEQ ID NO: 2471 - DNA, 303 bp, Homo sapiens
cctttccaggagaggctagaggcaggagaagaaggaagagaaattccttaaaacagaagctcctcccaagagataaggaagtcaaaaccacagttctaaagctggaccaaacagttcccaggcacagaaagggggaggtaaacctaactcaaactgtgccctctcatcaaagcctaaatgcccgctaacgtgatcccagtagctcttaggcagggagggcaagagaacacgaacacgctctcaaaccaacaggtggccctgtgggcagggctagtcttcctgggagtctaacgccattgacac

SEQ ID NO: 2472 - DNA, 487 bp, Homo sapiens
aaaaaatagcttgttgcttgcaagaaagtccatataatcttattcccccccaaatataattttatactttgcactaaaccaaaatagcttatggaaaattagtattaaatagctaaacacagaaaacctacagctataaataacataaaatacagtttaactttaatgtgatgcttaaacaaagcaaactatgatgcaatatgaatcaacttcattaattggacaagtccagtgaggcacaaattagataagcactaaaccctccatgatgtgcaagtgaagcctccaaccccagcaaggttctttctgttcttgggctatgtccaattccattccagaaaagccacagtttttacatgttcttgacttttttactgaggagacgcacaatatatttcacccaagtctgttttggatttgcgcacacagacaactttttctctgtgtgaaagatgatagcattgatgtcacagccttcattggccag

SEQ ID NO: 2473 - DNA, 193 bp, Homo sapiens
aaagtttgctgtgtttgtaaccagtgtgtgttgagaaggaccaacaccaaaccaccctggggaagggggacagggaaacatttaacacagacgatgatcaggatttgccccaaaccaccccaagagagaggactgagtggaacaaaaaagtgacccccagaacctctcttagtgtgagggtgggtagaatgag

SEQ ID NO: 2474 - DNA, 404 bp, Homo sapiens
cctggtgttgtggtacttgccaggtaacgttgttatttcagttgagcctggactgatgcatgaggttgtagattctccacgacctgaggttgtggagtgggcagatgagggtgttgttccacttgcatctgggctgctgtggaatattgttgatttcccactgtggcccgaagttgtggagctggcagggaagtgtgttgttggagtcgagcctgggctgcggtggtaggttgtagattcttcaacaggggctgttgcggtgctaggaggtgaaggcgtcgtgtgagttgaggctgggtgggtctggaaagtggtagattcttcctgaaggccagcgcttgtggagctggcaggggtcagtgttgtgtgtagcgagccagtgctgctgtgggtgggtgtagatg

SEQ ID NO: 2475 - DNA, 394 bp, Homo sapiens
gtgctgtgtgtgcatgtgtgtgctgtgtctttgtgtgtgtgctgtgtgctagtgtgctgtgtgtgcatgtgtgtgcgtgtgctgtgcgtttgtgtgctgtgtgctcgtgtgtgtgctgtgtgtgcgtgtgtgctgtgcgtttgtgtgtgctgtgcgtttgcgtgtgtgctgtgtgtgcatgtgtgtgcgtgtgtgtgccgtgcgtttgtgtgctgtgtgtgcatgtgtgtgcgtgtgtgtgctgtgcgtttgtgtgtgtgctgtgtgctcatctgtgtgctgtgtgtgctgtgcgtttgtgtgtgtgctgtatgctcgtgtgtgtgctgtgctcgtgtgtgtgctgtgttcatgcgtgtgctgtgtgttgtgtgtgtgtagctgcgggatgcat

SEQ ID NO: 2476 - DNA, 404 bp, Homo sapiens
ccactagctgaatcttgacatggaaggttttagctaatgccaagtggagatgcagaaaatgctaagttgacttaggggctgtgcacaggaactaaaaggcaggaaagtactaaatattgctgagagcatccaccccaggaaggactttaccttccaggagctccaaactggcaccacccccagtgctcacatggctgactttatcctccgtgttccatttggcacagcaagtggcagtgtctccaccacctatgatggtgatgcagcccctagaagtggctttcaccacctcatccatgagagctttggttccccgggcaaaagcttcccattcaaatacccccacaggaccattccacacaatctgcttagcccgagtgacagcctcagcatacttcttgctg

SEQ ID NO: 2477 - DNA, 270 bp, Homo sapiens
ctgtagttgagccctacaactccatcctcaccacccacaccaccctggagcactctgattgtgccttcatggtagacaatgaggccatctatgacatctgtcgtagaaacctcgatatcgagcgcccaacctacactaaccttaaccgccttattagccagattgtgtcctccatcactgcttccctgagatttgatggagccctgaatgttgacctgacagaattccagaccaacctggtgccctacccccgcatccacttccctctgg

SEQ ID NO: 2478 - DNA, 349 bp, Homo sapiens
ctgccggcgccgggaaaggggctcacgtaccagggactctccattgaggtagatgaggtcgaaggcgtacaaacacacctgcacctggatctcagacgcatccacctccttgcgtttgcgggtggtgagcacttggaatggctggatctgcttcttttcccggtcccaagccacggcttcggtgtccaggatgaaggatgtgaccgatgggagtttaatcttggggatgcggctgatgatgtccgggtacttcccagtgttgtcttcctgattcctgctgaagatcttcacctccccgccttccagggcgtggatctgtgccctctgcccgtcatatttgtattcgcag

SEQ ID NO: 2479 - DNA, 517 bp, Homo sapiens
ccacagtgccctggggctttccaaaggcacctcgcatgcctgtttggagcctacattggggtagtgcaaggtcagaaacatgaacatccacctgaaaggcctgtctccaaggtcccttagagcaacccatacaaccaacaggctgcgtacactaccaaggaagctgctgtgtgcagccatcgcacactgggtccccatgaggaaaggaactcagtcggcttaattggctgcggagcatcccaagaaccactgaaaaggcgccactgggctcctctgccagcttcagctacctgctggcaagatggttgtcattcagctaaaagcaagaagagctactcccatcaccagtgtttcccctaacctgtggggaagagcttgctaagacttactcatgctttgtttgtatctgcaggaaggggtcctgagtgaccactgaaagtcacttgccagcctggcttttctagtagccatagtggctgagtcactggggccacctctatgctctggtaaaataatg

SEQ ID NO: 2480 - DNA, 250 bp, Homo sapiens
caggaccccgagtgtgagttctacttcagcctggacgccgacgctgtcctcaccaacctgcagaccctgcgtatcctcattgaggagaacaggaaggtgatcgcccccatgctgtcccgccacggcaagctgtggtccaacttctggggcgccctgagccccgatgagtactacgcccgctccgaggactacgtggagctggtgcagcggaagcgagtgggtgtgtggaatgtaccatacatctcccagg

SEQ ID NO: 2481 - DNA, 313 bp, Homo sapiens; identical to SEQ ID NO: 2317

SEQ ID NO: 2482 - DNA, 361 bp, Homo sapiens
ccacacgcgacccgtggttgatttggccttcagtggcatcacgccttatgggtatttcttaatcagcgcttgcaaagatggtaaacctatgctacgccagggagatacaggagactggattggaacatttttgggtcataaaggtgctgtttggggtgcaacactgaataaggatgccaccaaagcagctacagcagacctgcccgggcggccgcccgggcaggtaaaaaaaagcacagctttttcaccttcatcttgtataatttcatagattggctgacttagggtctttcaatagtttgggaattgaaagattcttgttatatatagctagtttgggtttgtttttgttttaactatt

SEQ ID NO: 2483 - DNA, 263 bp, Homo sapiens
gcgagagaaatatccggagaagttcaacagcagaatgaagaacaagctgtggtacttcgaatttgccacatctgaatccatcttctcaacatgcaaaaagctggaggagtctttgacagttgagatctgtgggaaaccgctggatctgagcaacctgtccctagaaggcatcgcagtgctaaacatccctagcatgcatggtggctccaacctctggggtgataccaggagaccccatggggatatctatgggatcaaccagg

SEQ ID NO: 2484 - DNA, 472 bp, Homo sapiens
ccaaaaaaaaagagtcttctcccccctccccctttttggtgatgtgatcatacaggagacaggcacaaggttaacagagaagggtgaagggggaacaatgggaaccacagctaggaccagacaatgttccacaggcaaggggagcgtgaaagaccaagagtggaactaacaccgacagggatctggatgtgaaggaaacatggcagagtgaatcagagggaaaaaaaaaaaaaaatcacacagggagatggctgctcacttcccacaacccccagtttgcaggggagtgggaatagaggttaagtagtcctaaccctaccttcaaagatcaggataggtggtaaaaatattccaagtggaaggacgggttgtgggtgtgtacatggcatgggagagcagacagggaagggtaccaaggggcatgaggaggggaacctgagcagccacagccaggttactgcagtgaaagagt

SEQ ID NO: 2485 - DNA, 380 bp, Homo sapiens
ccaagtccaggggcgtggaggccgcccgggagcggatgttcaatggtgagaagatcaactacaccgagggtcgagccgtgctgcacgtggctctgcggaaccggtcaaacacacccatcctggtagacggcaaggatgtgatgccagaggtcaacaaggttctggacaagatgaagtctttctgccagcgtgtccggagcggtgactggaaggggtacacaggcaagaccatcacggacgtcatcaacattggcattggcggctccgacctggggcccctcatggtgactgaagcccttaagccatactcttcaggaggtccccgcgtctggtatgtctccaacattgatggaactcacattgccaaaaccctggcccag

SEQ ID NO: 2486 - DNA, 155 bp, Homo sapiens
cctggagctattctggtaccttccccatggaggacactgaaaaggctgggttggggacagggagtatcactccataagtgatcctaaaaggtagcctcttcataggaacccaggaggacaaaaccaccatgcattaagatttatttattgtattt

SEQ ID NO: 2487 - DNA, 289 bp, Homo sapiens
ccaattgatttgatggtaagggagggatcgttgacctcgtctgttatgtaaaggatgcgtagggatgggagggcgatgaggactaggatgatggcgggcaggatagttcagacggtttctatttcctgagcgtctgagatgttagtattagttagttttgttgtgagtgttaggaaaagggcatacaggactaggaagcagataaggaaaatgattatgagggcgtgatcatgaaaggtgataagctcttctatgatgggggaagtagcgtcttgtagacctacttgcg

SEQ ID NO: 2488 - DNA, 177 bp, Homo sapiens
aaaaggaacttcaagaactatttctccattccctgttgcatgatcgggaggtgggaggtggaggtgacatttggggaaactggttttttcttctctttacacccactgccattacttttgttggatcctggtctgtgggttctataaggccctgagactcagcaccctcctgcgcag

SEQ ID NO: 2489 - DNA, 115 bp, Homo sapiens
gttttgttgggggctttgtatgattatgggcgttgattagtagtagttactggttgaacattgtttgttggtgtatatattgtaattgagattgctcgggggaataggttatgtg

SEQ ID NO: 2490 - DNA, 455 bp, Homo sapiens
ccaccacatctttattgcatactcaggtgaataacttattatacaatgaacactcctccattaggagaccatgcccacttacagaatgcagccgtaaatgcggtaaatctatttacagaggttggggtgcaagatgagagaagtatcagccccaggaatttgaagtgagaatgatctacaaattctcctgacaaggagcaaccgggcttgtgctagtgaggtctgaaagaattcctggcagagcgtagggggagattagatctcggaattgacagcaagtttggggacagtgcaagaagagaggggtgacctgtgaattggtgctggggagctgctgaggcccaatgtgaggcagcactagagagatgagtaaatttagggtgatctttagcctctcctacccaggcaagaagggttggggagcgggggtgccggcaagttggcttccagtgtag

SEQ ID NO: 2491 - DNA, 157 bp, Homo sapiens
aaaaatgctgctttctgtattacaacaaaatgatatgcaataagaaattggaaaaagggagcaaaggagagtgcaaagcatgtactgaggtctttctatgggtgcctgacagaatgcagattcagcataaaatgtagactttgcaacagtggccttt

SEQ ID NO: 2492 - DNA, 177 bp, Homo sapiens
aaatcatcctgacaaaggaggatctccttatatagcagccaaaatcaatgaagctaaagatttactagaaggtcaagctaaaaaatgaagtaaatgtatgatgaattttaagttcgtattagtttatgtatatgagtactaagtttttataataaaatgcctcagagctacaatttt

SEQ ID NO: 2493 - DNA, 170 bp, Homo sapiens
tgacccactcactgggcgggggcacaggctctggaatgggcactctccttatcagcaagatccgagaagaataccctgatcgcatcatgaataccttcagtgtggtgccttcacccaaggtgtctgacaccgtggtcgagccctacaatgccaccctctccgtccatcag

SEQ ID NO: 2494 - DNA, 219 bp, Homo sapiens
ctagcctagccgtttactcaatcctctgatcagggtgagcatcaaactcaaactacgccctgatcggcgcactgcgagcagtagcccaaacaatctcatatgaagtcaccctagccatcattctactatcaacattactaataagtggctcctttaacctctccacccttatcacaacacaagaacacctctgattactcctgccatcatgacccttgg

SEQ ID NO: 2495 - DNA, 419 bp, Homo sapiens
aaaagaggacttactatataatcttaaacagcggggacccaatagtagtaaacaattgttaaagtctgatgttaactaccagtgtttattttctgctcacgtcctacacttgaggggtgttttgactacccagcctgtggaagatgaaagaggcaatgtgtttctatggaatggagaaatttttagtggaataaaggttgaagctgaagagaatgacactcaaattttgtttaattatctttcctcctgtaagaatgaatctgagattttgtcactcttctcagaagtacaaggtccctggtcatttatatattatcaagcatctagtcattatttatggtttggtagggatttttttggtcgccgtagcttgctttggcattttagtaatttgggcaagagtttctgcctctcttcag

SEQ ID NO: 2496 - DNA, 429 bp, Homo sapiens
ccatctttctattcgtaataacattctaaagagcattggatttctagatgcaaatgtggaaccctacaaatgttcatacctcttgtaaaagataggaaaatgttttttaggaggcatgttgtttggggacttttttgtgaggatttagaacagtttagtcagtctgaatatttattctaccaaaccctgtacaatagcattacatttatgcagaaaataatggatataaatgattatgagttagtgatttgttttttcccaaaaggccattagactaggtgtcttaactttttcttagagggccaaatagtaaatgtttttagacttgcaagccatacaactctgcagttgtggaaagcaaccacagacaaaacataaatgaatgagtgtaggcttgtttcaaagaaactttatttacgtaacaggtgg

SEQ ID NO: 2497 - DNA, 370 bp, Homo sapiens
caggcctggagaaagaattgaaatcagaaaaagagcaaagacaggctcttcagcgcgaattacagcacgagaaagacacttcctctctactcaggatggagctgcaacaagtggaaggactgaaaaaggagttgcgggagcttcaggacgagaaggcagagctgcagaagatctgcgaggagcaggaacaagccctccaggaaatgggcctgcacctcagccagtccaagctgaagatggaagatataaaagaagtgaaccaggcactgaagggccacgcctggctgaaagatgacgaagcgacacactgtaggcagtgtgagaaggagttctccatttcccggagaaagcaccactgccggaactgtgg

SEQ ID NO: 2498 - DNA, 219 bp, Homo sapiens
aaaatatacctgtaggggcctattctgactcagaacagcctgggctgtgtgtccttaaagagtacttgagatgactcagttgtgtgactaaggctgcaaaggaagtagagtgttcagataacacagacaaaaggttacatcattcttagtttttagttttatataaacacccccatttttagttttatataaccagataaatatggttcacttttattt

SEQ ID NO: 2499 - DNA, 133 bp, Homo sapiens
aaaaaaaaaaaaaaaaaaaaaaaaaaaaaaaaaaaaaaaaaaaaaaaaaaaaaaaaaaaaaaaaaaaaaaaaaaaaaaaaaaaaaaaaaaaaaaaaaaaaaarraaaaaaaaaaaaaaaaaaaaaaaaaaaaa

SEQ ID NO: 2500 - DNA, 270 bp, Homo sapiens
gtgaagacttcatagaaggcgacagattgatagggaggctattgaagcagtttttctgaagcctgcattttgagttagtttatagtgctaatagattctatataactgtgagagtttggtagtaaaccagtagggattgttttctctcctaaaaatttgcacactacttcattgtctaccaactttttacatattggaaaatagaaattgcaaatacatacatgtatggaaacatattcagattgggaaaaacaatggacattagttttt

SEQ ID NO: 2501 - DNA, 194 bp, Homo sapiens
cctttcactgcaacaagggaagtagtcttcggtccgaaacaggacgggggcttcgtagccggcttgctgtggcctcgagggagcagacttgctaaagagcgagggcacgttcatcgtgtgcaggagcttcttgaacgccctggggaaggtgcccagctcggcctcggccttggtgacctgctcctccatcctgg

SEQ ID NO: 2502 - DNA, 153 bp, Homo sapiens
catggctaggtttatagatagttgggtggttgctgtaaatgagtgaggcaggagtccgaggaggttagttgtggcaataaaaatgattaaggatactagtataagagatcaggttcgtcctttagtgttgtgtatggttatcatttgttttga

SEQ ID NO: 2503 - DNA, 565 bp, Homo sapiens
ccacctccccatatcctgagactgacagtgctttttttgagccttcccatctgacatctgctgctgatgaaggtgctgttcaagtcagtagaagaaccatttcttcgaattccttctcaccagaggtatttgtgctgcctgttgatgtagaaaaggaaaatgcccacttttatgttgcagatatgattatatcagcaatggagaaaatgaagtgtaacattctgagtcaacagcagacagagagctggagtaaagaagtcagtgggttacttgggagtgatcagcctgactctgaaatgacttttgataccaacataaagcaagagtctgggtcttctacttcttcatacagtggctatgaaggttgtgctgtgttacaggtcagcccagtgactgaaacacgtacttaccatgatgtgaaagagatttgcaaatgcgatgttgatgaatttgttattttagagcttggagattttaatgatatcacagaaacctgtagctgttcctgcagctcctttaagagtgtcacttatgagccagacttcaattctgcagaactattagc

SEQ ID NO: 2504 - DNA, 295 bp, Homo sapiens
aaaagacacaatgttaaaaatattacgaaaaatgtctacaaaatctggagggctgcctttttctcaaagggtaaagcctgtggggtggtgggaaaggaatcgagggcccagaactacaactctgcagcgaaagatagagatgcccttgaaaatgtgtcacattcttaagatgtcttgccgaagtagcaagagcggagggtgactgtgtgagcaggagcgagagggcgccagctcctgcgggggaggttcctactgcgcgccccaccctgtgcaagaatgtcaggctttagggcag

SEQ ID NO: 2505 - DNA, 219 bp, Homo sapiens
aaaacagggatccatcagaggtggtgaactatcaaggtcaaggttctagagcatggcacagatgaaaggtaatactcaccagcacctcacatgggactcagtgacaatgtcagcaacacaccatggaaggagaacaaacccgatgtaaaaggcacctagctggggagaagctgtggtgttcactgcctctctagcaggtttgcttttgtgcactgtggc

SEQ ID NO: 2506 - DNA, 582 bp, Homo sapiens
  misc_feature 516: n = A,T,C or G
aaacagggctgaattatacgcccatgtacccaaagtaaaaagccaagttttatgtagtttccagtgcagacgagggaacaccaaaccactgagccaagacgagaaccaaacacagaaaggtcccaagagtcagcaatttttctattgaattaatctcatcccagggtcaattttcaggattctattgcaatacttactgcataaaactatgtattaaaaaatagtaagaaaaacacgatgtaaaatacatcaaaatatactacataaaccccaaaggattttctatgtataccaatactacgaattagaacatcttaagtctttcattctccagctctttcagaccatgcagccaaagcctctggacagtgtcactggcggcacttctgtcccatagccttaggccgtatatcttttctctccttcatgtttggccttgtggtacttgagatagtcattatagagctccttaaagatgtctctcattcccggctgcagcgaggcccgcaggaactnggacgtcaggctcgatgcagaggtccaggatgaggtaaatgccctcctgcagcagacttttcacag

SEQ ID NO: 2507 - DNA, 142 bp, Homo sapiens
aaatggttacatgattttaattattcttttgataataagcaaccttgtgatatctattcaagaaaagccagagcccactatggaattcgcagttgaataagagctttgttccctgcttttggtaacgttaaagaaacaaatg

SEQ ID NO: 2508 - DNA, 136 bp, Homo sapiens
aaaattgtactgcaaaactattgtgtgctcttacacagtatgcatcatattgttgtctgtgaaattaaaggacatttgatagtctactgaatgtaaaatataatgcttggtatatgaatgataagcttgctcctgg

SEQ ID NO: 2509 - DNA, 392 bp, Homo sapiens
ctgaggctgggggagagccgtggtccctgaggatgggtcagagctaaactccttcctggcctgagagtcagctctctgccctgtgtacttcccgggccagggctgcccctaatctctgtaggaaccgtggtatgtctgccatgttgcccctttctcttttcccctttcctgtcccaccatacgagcacctccagcctgaacagaagctcttactctttcctatttcagtgttacctgtgtgcttggtctgtttgactttacgcccatctcaggacacttccgtagactgtttaggttcccctgtcaaatatcagttacccactcggtcccagttttgttgccccagaaagggatgttattatccttgggggctcccagggcaagggttaagg

SEQ ID NO: 2510 - DNA, 379 bp, Homo sapiens
ctgacgggccttggcggtaacctttgtgccttttatctttctcctttgtaggaaaagagggttagataagttattactctgtttcaactctaaaagtagaattttagatttgaactggacctgagaaatacaggagagggggtgaggggacagcatctgggttcttgttccccatctctactcaaattcctgaattagtgggattagcaggtttgttcaggggaaaggaaaggagtaaggtataacttctgtcagctttggtgctgacaggctctatagtttttgcacactgaaacatcattcaagaagatcaccgttcccaactgcagagcaatcaaatgagattataatatggaaagggggaagcatgaaggcttgg

SEQ ID NO: 2511 - DNA, 226 bp, Homo sapiens
ataaaatcaggtacaactccaaaaggagacattggagaagaaccaagctgggtctataaggaattgcacatgagatggcacacatatttatgctgtctgaaggtcacgatcatgttaccatatcaagctgaaaatgtcaccactatctggagatttcgacgtgttttcctctctgaatctgttatgaacacgttggttggctggattcagtaataaatatgtaagg

SEQ ID NO: 2512 - DNA, 243 bp, Homo sapiens
aaaatgctttttcacagtaaatttcttaggtgtcagattttccctcagaatagtgcaactggaagaagggaaatgttggcagtggctcaggactctctgctagtacaagtccttgtagatctcctgcaggagcgggtgaagactcatgtctgtctccgtcttcttgatcacctgcagtagctgcacgtgttccgtgacaatctgtctgaggtctgtcattttctggagcagcttggcaaacag

SEQ ID NO: 2513 - DNA, 392 bp, Homo sapiens
ccaattgatttgatggtaagggagggatcgttgacctcgtctgttatgtaaaggatgcgtagggatgggagggcgatgaggactaggatgatggcgggcaggatagttcagacggtttctatttcctgagcgtctgagatgttagtattagttagttttgttgtgagtgttaggaaaagggcatacaggactaggaagcagataaggaaaatgattatgagggcgtgatcatgaaaggtgataagctcttctatgataggggaagtagcgtcttgcctctgcaaagaaggaaggaggagaggtataggctggtaccgagtacactgacgaagcctgcacattcgtaggtgaggcagcattcactggccggggaggaagagcttgcttcatgg

SEQ ID NO: 2514 - DNA, 296 bp, Homo sapiens
ccagtcagggatgaggatggggcccgagggtctaaagaaggcactagagggacagggaccgctttgggtctcacccagtcaagttcacagtctgccctcttagtgtgaggaaatggggcttgaggtaccctgtttacttggcgctgggccaagccctccatctcctgagatggcctcatgtgggagaaggcggagggaaggtcggcttgggaatatcctatatgtctgtccgaaggctgtggcggggctcctgctccagggatgctgggacgtggcggtgcctgctaagtgctcag

SEQ ID NO: 2515 - DNA, 370 bp, Homo sapiens
ctgcacctctgaacgtatggaggaggaggtggggcctggagccttgtctaggcccctcccccaaccatttggggcttgagatgcccacgggagattgagatcatccaccctggactcccttatcccccagaggtctagaacacaggagctggaaggtctttatccaacaggcttactgcacagatgggccaaggggatgcagagggtggataggtgactgtccaccatgtcccagaaggtcarggctgagactcggaccagacctcctgggcccacaggagccacactcccagcacccgagtccccaggtcccccggcgcacargctgggcatggggctatggcagaaactcctctttcacaggcattgg

SEQ ID NO: 2516 - DNA, 295 bp, Homo sapiens
cggccgaggtccaattgatttgatggtaagggagggatcgttgacctcgtctgttatgtaaaggatgcgtagggatgggagggcgatgaggactaggatgatggcgggcaggatagttcagacggtttctatttcctgagcgtctgagatgttagtattagttagttttgttgtgagtgttaggaaaagggcatacaggactaggaagcagataaggaaaatgattatgagggcgtgatcatgaaaggtgataagctcttctatgataggggaagtagcgtcttgtagacctact

SEQ ID NO: 2517 - DNA, 157 bp, Homo sapiens
ctggaagccctgcaggcagtcacagctctctgcctccttccgtaccacatccaggacagaatcaaccagctcggcgccctctgtgtagtggcctttggcccagttgttacctgccccagactgaccaaatacaaagttgtctggtctaaagatctgg

SEQ ID NO: 2518 - DNA, 137 bp, Homo sapiens
gtgtctcaaagaagggtggaagttctaatgtctgttagctacccataagaatgctgtttgctgcagttctgtgtcctgtgcttggatgctttttataagagttgtcattgttggaaattcttaaataaaactgattt

SEQ ID NO: 2519 - DNA, 300 bp, Homo sapiens
aaagtatgaatctatgccaaagatcacttgttgttttactaaagaaagattacttagaggaaataagaaaaatcatgtttgctctcccggttcttccagtggtttgagacactggtttacactttatgccggatgtgcttttctccaatatcagtgctcaagacacagtgaagcaaattaaaaaaacaaaacaaaaaaaatccctgaatgatgattagagacatcaccgctaaaaaactacatttataagctaggatttgttatatgcaaatattttctgcctcttcttttgttctgttt

SEQ ID NO: 2520 - DNA, 64 bp, Homo sapiens
ytycaaagccctggtggcctattaccasaaatatgwggatgaggcttccaasaaggagatcaaa

SEQ ID NO: 2521 - DNA, 178 bp, Homo sapiens
ctgactcttcctgacagtctcacctctgcagcctcaccagaagatgggctgtccgccgagctgcttgaagctcaggctgaggaggaaccagcaagcacagagggcctagatactgggacggaggctgaggggctggacagccaggcccagatctctaccacagaataacaccctgggc

SEQ ID NO: 2522 - DNA, 175 bp, Homo sapiens
cctcagtcaggaacctacaacttcccacagcagccaaggctcaacagaggcaacactgtcccctggcagtaccacagcctcatcccttggtcaacaatctacaaccttccacagcagcccaggcgacactgaaaccacactcttacctgacgacaccataacctcaggacctgcc

SEQ ID NO: 2523 - DNA, 569 bp, Homo sapiens
aaagcatttgttccaataaaataaatagagggaaacttggatgctaaaattacatgaataggaatcttcctggcacttagtgtttctatgttattgaaaaatgatgttccagaaagattacctttttcctcttatttttactgccattgtcgacctattgtgggacatttttatatattgaatctgggttcttttttgactttttttcccaatccaacagcatccttttttttacctgcccgggcggccgcccgggcaggtctgggagcctgctttctgccagtcttgaggttctgaagatcagctttgaaaggaaagtatgtcctagcttagccattcagaagagaaaaatggaatatcagagttacagttgtcagtgaaactactttggattttaacctcttagaggaagaaaaaggttagggaagtgtcaactctggatgaaggtgatgtgtttgcctctcagtctttcattcatagcctgctagtgaaagggaagtaaatgagattcttttgtgtgactttgtagtctctttgtattaccaaatagttgggggtgttgactcctg

SEQ ID NO: 2524 - DNA, 250 bp, Homo sapiens
aaacatcactggaaagctgaatttagaggaaacaatatcagataaaagtacaatgcccgtgacagccaacattatgtaactgggctgtatgaggttgtttagaaggctagggttaaaaagatagatagacaaaaagatttttaaaaatcacccccaaagttgatgcgctgatttgaacataagtacaccagatactacagcaaggggatatacactgcaaaaaggtcatctatttacagaagagtgattt

SEQ ID NO: 2525 - DNA, 433 bp, Homo sapiens
ccaattgatttgatggtaagggagggatcgttgacctcgtctgttatgtaaaggatgcgtagggatgggagggcgatgaggactaggatgatggcgggcaagatagttcagacggtttctatttcctgagcgtctgagatgttagtattagttagttttgttgtgagtgttaggaaaagggcatacaggactaggaagcagataaggaaaatgattatgagggcgtgatcatgaaaggtgataagctcttctatgataggggaagtagcgtcttgtagaccctgaagcggaaatgtgagacaggctggcacctccggaaaaactgcctttcagccttggtgttccgtgcaaggtgaaaagaaataggtcctcccagtttacagcttgaaatcaggctagtgagtggccctggagaccacgagggggagaattt

SEQ ID NO: 2526 - DNA, 262 bp, Homo sapiens
cctggtggctttgccgaagctctgggaccgcagccccagcgaggctcccaacctcacccagacgaggccaggagccccgccaccctccacgggatgtgcaccctcagaccccattctctctgttcgtccttccttgaccagtctgtaaaccttcactgtttggggatcgtcctgtccatccatgtaaatgtaaatgttggccgagtcggtatttattctgattgatttttattttattctattattttctccgagggatgag

SEQ ID NO: 2527 - DNA, 611 bp, Homo sapiens
  misc_feature 490: n = A,T,C or G
aaaatactggcactttaagaaaacgataatctcgaaaaccacaaaattgccaaattgttccctaaactcctaagcagataaacatgactaatgaatgagtttgttttgtaaagaaaaatcattcaaataaattgaataattcatactgagatgcaaagtttgtcttctttcttcctatctacttggatttataaaggggcaaaccgtaatataggaaaatataccctattttgaatgtggcatctttgtttgaaaagctggcccaattaattaaaaatacttgtaatggaaagtctcgtttcctgagcagtccatatttagataaatgggaaaagacatctatagccagcattttcatagtcttcactgagactaatgtcaacaaaaaatttaatatggcagtcttgtattttaagctcacgcttttggggatacattctcaggtcttctttaatgtgggaactgcaaaatataactgccattacatggnaatggggagttaaagaatagagtcctcatgtaaaggttagaacatacttttctattagtccctcaaggacagactttcaaaatgtttgattctaataatcccatgctttgagtagattgat

SEQ ID NO: 2528 - DNA, 202 bp, Homo sapiens
gaaatattggtgtataatccccatgtctaacaaggaagaagtcaaaagcaaaagatagtggtattgccgaaaactcattatttctagttagttcatctgtggaaaaggatatcgttcttgaggagaggggttctattatgctatagttttctatggaaatgtacaaatgctttcctcattgctctggatgactatttagttt

SEQ ID NO: 2529 - DNA, 599 bp, Homo sapiens
  misc_feature 6: n = A,T,C or G
tatacnactcctatagggcgaattgggccctctasatgcatgctcgagcggccgcccgggcaggtctgtccaatggcaacaggaccctcactctattcaatgtcacaagaaatgacacagcaagctacaaatgtgaaacccagaacccagtgagtgccaggcgcagtgattcagtcatcctgaatgtcctctatggcccggatgcccccaccatttcccctctaaacacatcttacagatcaggggaaaatctgaacctctcctgccacgcagcctctaacccacctgcacagtactcttggtttgtcaatgggactttccagcaatccacccaagagctctttatccccaacatcactgtgaataatagtggatcctatacgtgccaagcccataactcagacactggcctcaataggaccacagtcacgacgatcacagtctatgcagagccacccaaacccttcatcaccagcaacaactccaaccccgtggaggatgaggatgctgtagccttaacctgtgaacctgagattcagaacacaacctacctgtggtgggtaaataatcagagcctcccggtcagtcccaggctgcag

SEQ ID NO: 2530 - DNA, 500 bp, Homo sapiens
ccactattctcacattgggagcagtgtataagtgattcagcctttcctttcttgttggactccttacccttcagacaaattccacatatagcatttggaatgacctttggcttgtacccaggaactgacttggacagtacagaacgtttgggaccatcttttcttggagtggcagctttgtcttttgatttctgtcttccctggaaagagtcctcctggctgtcargagggctttccccttcagatacattgccagaggagctgtccgaagtgcctttatttttccgtttctcatcacctcgaccatcttsgccatcatctgaatcaccatcactgtctagagcagggagctcaggatccagagggggctcatacagggctgtgtttaatggcagataccgcagctcatctggtgagtacctcttataatattcctggaactgtccggggatgagagccactgggtaagaactgacctttgttcgctctgttggcaaaac

SEQ ID NO: 2531 - DNA, 229 bp, Homo sapiens
cctatacagaagctatagagaggttcgtcagggcgagtgcgaaaggcttgcacatactgtccaagcgcatgcttaaaactaccagatacaaatgcattgtgtccatttaagacacatagggcatgattttctgggtttttcagcatcaaacggagacagaagcgatgatgtcgtacatcttgggagtgcatggtaacttgattgaaaatgttccagagctggggtttat

SEQ ID NO: 2532 - DNA, 167 bp, Homo sapiens
ccaacaataaactcgtcaggagatcgaaggttgtagatgtctgcacgtggcttccttggaggtccagtggtgactccctcttccaaaatccattctgtacccgctggctgctctaacgggcaggacaatagcgtatgaagcctgactgcaactaggagaagtaccac

SEQ ID NO: 2533 - DNA, 514 bp, Homo sapiens
agcgtggtcgcggccgaggtacaaagcagcaactgcaatactcaaggttaaaacattagaaaagcatttgtgtgacaggtatattacagtattatcaaaatattacattttcagacttacttagcagataatcatccaccagagcttaaatctttaaattatttccatagtcttaaaaaatatgtaatgtcagaatgcatataaaaagaatgtaaaaggaaacctaaaatacaaatggaataatgtaacaaataaatatttgatttcagtaactgttaataatcagctcaacaccaccattctctctaaactcaatttaattcttataggaataatgaactgtcaaatgccatggcataattatttatttccaagctatcatcaatgattagaactaaaaaaatttggcataaaaaaatcacaattcagcataaataaagctatttttagcttcaacactagctagcatctctaagaattgttgaaataagtacctgcccgggcggccgctcga

SEQ ID NO: 2534 - DNA, 524 bp, Homo sapiens
agcgtggtcgcggccgaggtacaagtattcttgatctcagagacaagttcaatgaatctcttcaagtgaatactactgctctcatcccaaaggaagccaactctgaggaagtctttttgtttaaaccagaaaacattacttttgaaaatggcacagatcttttcattgctattcaagctgttgataaggtcgatctgaaatcagaaatatccaacattgcacgagtatctttgtttattcctccacagactccgccagagacacctagtcctgatgaaacgtctgctccttgtcctaatattcatatcaacagcaccattcctggcattcacattttaaaaattatgtggaagtggataggagaactgcagctgtcaatagcctagggctgaatttttgtcagataaataaaataaatcattcatccttttttttgattataaaattttctaaaatgtattttagacttcctgtagggggcgatatactaaatgtatatagtacctgcccgggcggccgctcga

SEQ ID NO: 2535 - DNA, 473 bp, Homo sapiens
tcgagcggccgcccgggcaggtactctgctatggtgctggcttcctttaaactcaggatagatgccaggtgggctccgtttccgtaagactgacactcgagctcggcatcagaccagttcctcagcttcctgaagtaaccatagcaattggacttgtggtaaaaccatccaggagcacagctgggtctcatgatgatatcacccaggactcctgttttggccaggcagctcagcaataggagcagccgcatgcttctggaagccatcttcctcctaccctgaggatgtagctagtgcaaggatctcagagaccttactagcgcttctttgaaactcctgggttctccttgatctgcaaatctgtttggcaaccaagactctaagggcccctgccttcttcagtgtctccagtggtcccagtcaacgtttctggagcttttatatcttcttgccacctcggccgcgaccacgct

SEQ ID NO: 2536 - DNA, 584 bp, Homo sapiens
agcgtggtcgcggccgaggtatggggtccgggggcctggccgccgggatagccgggggtctggcaggaatgggaggcatccagaacgagaaggagaccatgcaaagcctgaacgaccgcctggcctcttacctggacagagtgaggagcctggagaccgagaaccggaggctggagagcaaaatccgggagcacttggagaagaagggaccccaggtcagagactggagccattacttcaagatcatcgaggacctgagggctcagatcttcgcaaatactgtggacaatgcccgcatcgttctgcagattgacaatgcccgtcttgctgctgatgactttagagtcaagtatgagacagagctggccatgcgccagtctgtggagaacgacatccatgggctccgcaaggtcattgatgacaccaatatcacacgactgcagctggagacagagatcgaggctctcaaggaggagctgctcttcatgaagaagaaccacgaagaggaagtaaaaggcctacaagcccagattgccagctctgggttgaccgtggaggtagatgcccccaaatctcaggacctc

SEQ ID NO: 2537 - DNA, 558 bp, Homo sapiens
  misc_feature 545: n = A,T,C or G
agcgtggtcgcggccgaggtaccgaccatagagcaagaatcaagattctgctaactcctgcacagccccgtcctcttcctttctgctagcctggctaaatctgctcattatttcagaggggaaacctagcaaactaagagtgataagggccctactacactggcttttttaggcttagagacagaaactttagcattggcccagtagtggcttctagctctaaatgtttgccccgccatccctttccacagtatccttcttccctcctcccctgtctctggctgtctcgagcagtctagaagagtgcatctccagcctatgaaacagctgggtctttggccataagaagtaaagatttgaagacagaaggaagaaactcaggagtaagcttctagaccccttcagcttctacacccttctgccctctctccattgcctgcaccccaccccagccactcaactcctgcttgtttttcctttggccataggaaggtttaccagtagaatccttgctaggttgatgtgggccatacattcctttaatnaaccattgtgtac

SEQ ID NO: 2538 - DNA, 398 bp, Homo sapiens
agcgtggtcgcggccgaggtaccattcagttcagctgcaggtataggcagtgacaagtatctaattcttagaagaatcacttactcccacaatctgtccagacacattaatctaaggacaagtttataaatagcaaacgtgattttcacattgcagtgttctcaagaatgtatatacaagtgtgtagtcctgttgatgggatgtttccccgagttctttctattgatgcgttcatgctcttgaccctggtagagacagttctttctttccacagagcagattttcttttgtcatccaccatttacaatactctgtgaattagtattacttattacatttatgaaacggcaatatttggattgtaatagctcttcagtacctgcccgggcggccgctcg

SEQ ID NO: 2539 - DNA, 329 bp, Homo sapiens
tcgacggccgcccgggcaggtacaattacccaccactggatttgactcagagaggacccccagagggtgtctccatcttccctatttattttcagcccttgagggcttcattgtagatcaaagccaaggcccccaggaaggtgacatactcctggaagttcacctcctggtccttgttccggtccaagtcttccatcagccttgcaatttcagcatcctgcagcttcgagccaatggtgagctccttctggatcagctccttcagctccttcttgctcagggtgtgcttgtcaccctccctgccggagtacctcggccgcgaccacgct

SEQ ID NO: 2540 - DNA, 448 bp, Homo sapiens
tcgagcggccgccgggcaggtaccctgcttctgctggcttaatgcctcagaactttggtgtcattggtctcagacaccactttgccatccactatccggcgggtggtggtcttttggatggtttgcatggagttgctgctgtccaaggcatcaccaagattaaagtcctcgccatcttccagcaggcggcggtaggtggcgatctcagcctccagcttgaccttgatgttcagcagggcctcatactcctgggcctggcgctgtccctctgcccgggtctgtgccagctctgactcaaggtgcagcaggatcccgttgagctgctccatctgtagggcgtagcgggcctccgcctccctcaggctgttctccaagctggccttcagatttctcatggagtccgggtcgatctccaaggactggactgtacctcggccgcgaccacgct

SEQ ID NO: 2541 - DNA, 415 bp, Homo sapiens
tcgagcggccgcccgggcaggtaccatttctctgttgtatgttggattatgtaggaaatgtttgtgtaccctgcttctgctggcttaatgcctcagaactttggtgtcattggtctcagacaccactttgccatccaccatccggcgggtggtggtcttttggatggtttgcatggagttgctgctgtccaaggcatcaccaagattaaagtcctcgccatcttccagcaggcggcggtaggtggcgatctcagcctccagcttgaccttgatgttcagcagggcctcatactcctggacctggcgctgtccctctgcccgggtctgtgccagctctgactcaaggtgcagcaggatcccgttgagctgctccatctgtagggcgtagcgggccacctcggccgcgaccaccgct

SEQ ID NO: 2542 - DNA, 247 bp, Homo sapiens
agcgtggtcgcggccgaggtacccccttccacttcgtctcccctagctcctagaagcaaccactgatgtgatttctaccaaatccagttttggtcctactaaatatactcttttgagactggcctcttttactcaccataatgcctttgtaattcatccatgctgttgtgtgtatcagcagtttgttccttttcattgctgagtagtattctattgtagagatgtacctgcccgggcggccgctcga

SEQ ID NO: 2543 - DNA, 261 bp, Homo sapiens
aagcgtggtcgcggccgaggtacaagactcaagtaaatagaaaggcagctttcaatcacaaatcagtttttcagattttactgtggaagcatatttaatgcacacatttgaatgttacacataaataattttaacgatggagtccaagttctggattttacattagatctgcatatataagacacttgtggtcaaatttcaagattggtaaagccagtttcaagctgcttatattttgagtacctgcccgggcggccgctc

SEQ ID NO: 2544 - DNA, 357 bp, Homo sapiens
agcgtggtcgcggccgaggtctgaattctcaatgcagggtctaaaagctggtgttattgctgttattgtggttgtggtgatagcagttgttgctggaattgttgtgctggttatttccagaaagaagagaatggcaaagtatgagaaggctgagataaaggagatgggtgagatgcatagggaactcaatgcataactatataatttgaagattatagaagaagggaaatagcaaatggacacaaattacaaatgtgtgtgcgtgggacgaagacatctttgaaggtcatgagtttgttagtttaacatcatatatttgtaatagtgaaacctgtacctgcccgggcggccgctcga

SEQ ID NO: 2545 - DNA, 568 bp, Homo sapiens
  misc_feature 512: n = A,T,C or G
agcgtggtcgcggccgaggtacgggaccctgttcacgatggaccgggtgctgacccccccaatggggactgtcatggatgtcctgaagggagacaatcgctttagcatgctggtagctgccatccagtctgcaggactgacggagaccctcaaccgggaaggagtctacacagtcttcgctcccacaaatgaagccttccgagccctgccaccaagagaacggagcagactcttgggagatgccaaggaacttgccaacatcctgaaataccacattggtgatgaaatcctggttagcggaggcatcggggccctggtgcggctaaagtctctccaaggtgacaagctggaagtcagcttgaaaaacaatgtggtgagtgtcaacaaggagcctgttgccgagcctgacatcatggccacaaatggcgtggtccatgtcatcaccaatgttctgcagcctccagccaacagacctcaggaaagaggggatgaacttgcagactctgcgcttnagatcttcaaacaagcatcagcgttttccagggcttcccagaggtctgtgcgacta

SEQ ID NO: 2546 - DNA, 382 bp, Homo sapiens
mgcgtggtcgcggccgaggtacagaactcagaggaaaaaagaaattaaattttagctttctggagagcagcccctctctggcaccatcaaacacttctttgtttcccttcaacttggaactcttcaaacatcaggggttgtgagggtttggccattcttttatcttgggtccatgtgagtgacagaaatggtgcggcctgggaaagatctccctcctttacattttctcttctccctcctcctccttattctaaaactgtgcctccaacagaggggcaggggctcttgtagagagatccctggcccaggacaggagatgccaaatctaatttatctcactgagggcctttgagaaaaacgcacctgcccgggcggccgctcg

SEQ ID NO: 2547 - DNA, 543 bp, Homo sapiens
gagcggccgcccgggcaggtacttcagttggtgcacaaaatactgtcatttgctcaaagctggctgccaaatgtttggtgatgaaggcagaaatgaatggctcaaaacttgggagaagagcaaaacctgaaggggccctccagaacaatgatgggctttatgatcctgactgcgatgagagcgggctctttaaggccaagcagtgcaacggcacctccacgtgctggtgtgtgaacactgctggggtcagaagaacagacaaggacactgaaataacctgctctgagcgagtgagaacctactggatcatcattgaactaaaacacaaagcaagagaaaaaccttatgatagtaaaagtttgcggactgcacttcagaaggagatcacaacgcgttatcaactggatccaaaatttatcacgagtattttgtatgagaataatgttatcactattgatctggttcaaaattcttctcaaaaaactcagaatgatgtggacatagctgatgtggcttattattttgaaaaagatgttaaaggtg

SEQ ID NO: 2548 - DNA, 181 bp, Homo sapiens
tcgagcggccgcccgggcaggtagacaccctctgggggtcctctctgagtcaaatccagtggtgggtaattgtacaaaactttttatatcaaaaggctttgcacatttctatatgagtgggtttactggtaaattatgttattttttacaactaattttgtacctcggccgcgaccacgct

SEQ ID NO: 2549 - DNA, 550 bp, Homo sapiens
agcgtggtcgcggccgaggtacttgtctagctcctctcggttcttccgagccagctcgtcatattgggcccggatgtctgccatgatcttggcgaggtcctgagatttgggggcatctacctccacggtcaacccagagctggcaatctgggcttgtaggccttttacttcctaaaggtgacaggggcaaaagtgaggagggttcagggtcagagctccaacaaggcctttcttctgtgattgcctcttctaggaggcctacagttggagaagagacaggaggaaccccttggcttgcactcagggcaatgccagttctggcctttctactccagtgggtagaaatgccacccactcactgatggtttctctgtaacttcaccccgttcctttatccaccctccccttcacaaacctgctccttctaccatcttttaggaagcgctgccaactccatctgctgtcattcctttatcacccccagctcctagtgttagctgcttctacttctgttctcatctcattttctaacccatatcattttgacctg

SEQ ID NO: 2550 - DNA, 389 bp, Homo sapiens
tcgagcggccgcccgggcaggtaccttattatcctacatcgcaaatttcaacagctacattatatttccttctgacacttggaaggtattgaaatttctagaaatgtatccttctcacaaagtagagaccaagagaaaaactcattgattgggtttctacttctttcaaggactcaggaaatttcactttgaactgaggccaagtgagctgttaagataacccacacttaaactaaaggctaagaatataggcttgatgggaaattgaaggtaggctgagtattgggaatccaaattgaattttgattctccttggcagtgaactactttgaagaagtggtcaatgggttgttgctgtcatgagcatgtacctcggccgcgaccacgct

SEQ ID NO: 2551 - DNA, 577 bp, Homo sapiens
agcgtggtcgcggccgaggtacagtgatagctccccctgggcaatacaatacaagaacagtgggttttgtcaaattggaacaaggaaacagaaccacagaaataaatacattggttaacatcagattagttcaggttacttttttgtaaaagttaaagtagaggggacttctgtattatgctaactcaagtagactggaatctcctgtgttctttttttttttaaattggttttaattttttttaattggatctatcttcttccttaacatttcagttggagtatgtagcatttagcaccactggctcaatgcgctcacctaggtgagagtgtgaccaaatcttaaagcattagtgctattatcagttaccaccatttggggcttttatccttcatgggttatgatgttctcctgatgacacatttctctgagttttgtaattccagccaaagagagaccattcactatttgatggctggctgcatgcagacatttaaagcttttagagaatacactacaccagggagtatgactactagtatgactattaggagggtaataccaagagttggacta

SEQ ID NO: 2552 - DNA, 460 bp, Homo sapiens
tcgagcggccgcccgggcaggtcattttccccagctaaatcataacataaaaattactgtcattcctttaaaaaaaaataagcaaatgcaatctccttatcaaaatattaagaaggaaggaaggatatagtttcaaaatagtcccttaagttgaggaactctagctttaaacatgttttttaaattttcattttgcttttaaccagtgaaaacttcatatagaatgagcttcaatttgtgtgccagtgtttaggcacttgaggttagcaaaacaaatcctttatactgcaatttgtttcctcatgtgtatttttacaggtgaatatttatcgtctagttacaaagggatcagttgaagaagatattcttgaaagggcgaaaaagaagatggttttagatcatcttgtaattcaaagaatggacacaactgggaagacagtacctcggccgcgaccacgct

SEQ ID NO: 2553 - DNA, 419 bp, Homo sapiens
agcgtggtcgcggccgaggtacaaagtgtcctacaaggggccaggaccaggcatcaagttcagtgcagaggccctgcgctgccacctccgggaccatgtgaatgtatccatggtagaggtcacagattttcccttcaatacctctgaatgggagggttatctgcccaaggagagcattaggaccaaggctgggccttggggcaggtgtgctgttgtgtcgtcagcgggatctctgaagtcctcccaactaggcagagaaatcgatgatcatgacgcagtcctgaggtttaatggggcacccacagccaacttccaacaagatgtgggcacaaaaactaccattcgcctgatgaactctcagttggttaccacagagaagcgcttcctcaaagacagtttgtacctgcccgggcggccgc

SEQ ID NO: 2554 - DNA, 293 bp, Homo sapiens
agcgtggtcgcggccgaggtacaaatctggggtttggccattaaaagttatttacaacagtgggagaaaaaaagacaagaagttgtttcacattacagacctccccccaccccaaagcctaatacttgcttaccaagtcaaaaaagagacacagttgattcacaggctggaggtttgaacttgagtaagacatttataaaaacctagacggggcagtgtcctccccagcccaggtgccactaggcacagcacaagagactaaaaacaacagggacctgcccgggcggccgctc

SEQ ID NO: 2555 - DNA, 364 bp, Homo sapiens
agcggccgcccgggcaggtccgggcaggtctttaatgtataaaataaatattatacaatatacttgtatagcagtttctgcttcacatttgattttttcaaatttaatatttatattagagatctatatatgtataaatatgtattttgtcaaatttgttacttaaatatatagagaccagttttctctggaagtttgtttaaatgacagaagcgtatatgaattcaagaaaatttaagctgcaaaaatgtatttgctataaaatgagaagtctcactgatagaggttctttattgctcattttttaaaaaatggactcttgaaatctgttaaaataaaattgtacctcggccgcgaccacgct

SEQ ID NO: 2556 - DNA, 319 bp, Homo sapiens
gagcggccgcccgggcaggtactaacaaaaactctagcaatcaagaatggcagcatgttattttataacaatcaacacctgtggcttttaaaatttggttttcataagataatttatactgaagtaaatctagccatgcttttaaaaaatgctttaggtcactccaagcttggcagttaacatttggcataaacaataataaaacaatcacaatttaataaataacaaatacaacattgtaggccataatcatatacagtataaggaaaaggtggtagtgttgagtaagcagttattagacctcggccgcgaccacgct

SEQ ID NO: 2557 - DNA, 399 bp, Homo sapiens
cggccgcccgggcaggtaccgttgcccatgcggggattaatgtgcagagctatgtcccctgaggagcccaccttgaagttgatagcaaagctcttgcctgtgggaggcacatagcccttgatgatgatggttcttcgagctgtgagccctccttgcagcctcccgaaatatggcacaggcgggttgaaggttgggggtccttccatggtgggcaggctgttcagctgttgatggcaatgtccgggaccagggtaaagtggcatcatcgggggtccctggggccggaggggctggcctccgatgaagttgattgattgaagttgcagatccccatccacttgcaggtgggtgaccatctgtaggggaagccggtgcccgtacctcggccgcgaccacgct

SEQ ID NO: 2558 - DNA, 208 bp, Homo sapiens
ggccgcccgggcaggtactcagcattcccgtgaacacacacccccttggactcttgggagaaagaacggagaaggccgttcgttggagactgccccggggcggccacctggccagacccccactcccggtgcacacccagtggatggagcgagcgctcagggctggggtgggtgcatcagccaagcgtacctcggccgcgaccacgct

SEQ ID NO: 2559 - DNA, 383 bp, Homo sapiens
agcgtggtcgcggccgaggtcgcctcgtcctccatagcagccaagatgatgtccgcggcggccattgccaatgggggtggagttgcctcgggcagccttgtggctactctgcagtcactgggagcaactggactctccggattgaccaagttcatcctgggctccattgggtctgccattgcggctgtcattgcgaggttctactagctccctgcccctcgccctgcagggaagagaaccatgccaggggagaaggcacccagccatcctgacccagcgaggagccaactatcccaaatatacctggggtgaaatataccaaattctgcatctccagaggaaaataagaaataaagatgaattgacctgcccgggcggccgct

SEQ ID NO: 2560 - DNA, 197 bp, Homo sapiens
gcgtggtcgcggccgaggtactataatttgcccttaaaaatttgtcaggagtttagatctcatgttattttctgactatagttaaaaaagtgaaagacatttgggggaaacattaaattttttccataagtggaaattcttatcaatggcctaaagatctaagatcaattgctggaagtagtacctgcccgggcggc

SEQ ID NO: 2561 - DNA, 483 bp, Homo sapiens
agcgtggtcgcggccgaggtacagcagccttggttcctctgggggttgagaataagaatagtggggagggaaaaactcctccttgaagatttcctgtctcagagtcccagagaggtagaaaggaggaatttctgctggactttatctgggcagaggaaggatggaatgaaggtagaaaaggcagaattacagctgagcggggacaacaaagagttcttctctgggaaaagttttgtcttagagcaaggatggaaaatggggacaacaaaggaaaagcaaagtgtgacccttgggtttggacagcccagaggcccagctccccagtataagccatacaggccagggacccacaggagagtggattagagcacaagtctggcctcactgagtggacaagagctgatgggcctcatcagggtgacattcaccccagggcagcctgaccactcttggcccctcaggcattatcccatttggaatgtg

SEQ ID NO: 2562 - DNA, 521 bp, Homo sapiens
agcgtggtcgcggccgaggtacacaatttaatttacgcagaagagcatcggagacatttgtctcatagatatgattgacatgagtgataggctaaaactaaaattttagtggtttgcggagtggctagaaaacatgaattgtaagcagtttttcagaatttaaaaatctcttagtttgaacagtagaagatgtaaataagcatagagactgttggcaagttatgtttatcacaaaacagagaagaaggcacagagggtccctttgacccttgaacttgtggttactaatagtattaaggttggaaatcatgaggaaggacacagaatataaactgggatcttgaagacaggcatgttgataaaagtagccctgaagccttaatattagcaacatcgaagatgggaaagacaggattgatttatttgggaactaagtttacacattatatgtctcaatataaaacaaaagctatggctttagagtttaacaggttaaaaaaaaataggaggaaaggcaaaac

SEQ ID NO: 2563 - DNA, 543 bp, Homo sapiens
tcgagcggccgcccgggcaggtactgactgagataagaaaagcctgaactatttattaaaaacatgaccactcttggctattgaagatgctgcctgtatttgagagactgccatacataatatatgacttcctagggatctgaaatccataaactaagagaaactgtgtatagcttacctgaacaggaatccttactgatatttatagaacagttgatttcccccatccccagtttatggatatgctgctttaaacttggaagggggagacaggaagttttaattgttctgactaaacttaggagttgagctaggagtgcgttcatggtttcttcactaacagaggaattatgctttgcactacgtccctccaagtgaagacagactgttttagacagactttttaaaatggtgccctaccattgacacatgcagaaattggtgcgttttgttttttttttcctatgctgctctgttttgtcttaaaggtcttgagggttgaccatgttgcgtcatcatcaacattttgggggttgtgttgga

SEQ ID NO: 2564 - DNA, 455 bp, Homo sapiens
agcgtggtcgcggccgaggtacttgtttcaccatacttcattcagaccagtgaaagagtagtgcatttaattggagtatctaaagccagtggcagtgtatgctcatacttggacagttagggaagggtttgccaagttttaagagaagatgtgatttattttgaaatttgtttctgttttgtttttaaatcaaactgtaaaacttaaaactgaaaaattttattggtaggatttatatctaagtttggttagccttagtttctcagacttgttgtctattatctgtaggtggaagaaatttaggaagcgaaatattacagtagtgcattggtgggtctcaatccttaacatatttgcacaattttatagcacaaactttaaattcaagctgctttggacaactgacaatatgattttaaatttgaagatgggatgtgtacctgcccggscggccg

SEQ ID NO: 2565 - DNA, 552 bp, Homo sapiens
  misc_feature 523: n = A,T,C or G
tcgagcggccgcccgggcaggtacaggtcagagtcttcttttcttttctttttgagatggagtcttgctctgttgccagactggagtgcagtggtgcgatctgggctcactgcaatctccacctcccgggttcaagcgattctcctgcctcagcctcccgagtaactgggactacaggtgcgcgccaccaagcccagctcatttttgtatttttagtagagatggggtttcacgatgttggctaggatggtctcgatctctggtcagagtcttttctgtaaatatccttggtaaagaagcaattttagactgtagctgttgcaaatgctttaaggaagaagcaaaacaactgtcagtcttcctgaaatgaagaaactacaccagggctgctatatcagagcaaccccaaccagcactccaatcatgatgccgacagtggccccagctgagagaccaggagaagttccagatgcagagactgtgatgctcttgactatggaattattgcggccagtagccaagntagagacaaaacaggcataggtcccgtta

SEQ ID NO: 2566 - DNA, 495 bp, Homo sapiens
tcgagcggccgcccgggcaggtacctgtgggtttattacctatgggtttatatcctcaaatacgacattctagtcaaagtcttggtaatataaccaatgttttcaaatgtattctgtcatacaaagagcagatttttattgaacttgtgcaataactatattaccatacaatataaatattcatgaatagtttcccaagtctggagcgaccacatagggagaaaatgtaaatgtctcaatttttgttcacaaaagtatattttatcaaattgctgtaagctgtggatagcttaaaagaaaaaaagtttcctgaaatctgggaaacaagacatttaaagaatcagcaaaatttcaaataaaaaattatgaaaatattatcctcattagttcatttagtcccatgaaattaattattttctctgcttgatcttggtggacagtttcatgaagctgtcagttagttcattaaagttttggaaattytcagacagtgca

SEQ ID NO: 2567 - DNA, 400 bp, Homo sapiens
cgagcggcgcccgggcaggtacaagggcatgacaggctgggaggtggctggtgatcacatttacacagctgctggagcctcagacaatgacttcatgattctcactctggttgtgccaggatttagacctccgcagtcggtgatggcagacacagagaataaagaggtggccagaatcacatttgtctttgagaccctctgttctgtgaactgtgagctctacttcatggtgggtgtgaattctaggaccaacactcctgtggagacgtggaaaggttccaaaggcaaacagtcctatacctacatcattgaggagaacactaccacgagcttcacctgggccttccagaggaccacttttcatgaggcaagcaggaagtacctcggccgcgaccacgct

SEQ ID NO: 2568 - DNA, 490 bp, Homo sapiens
agcgtggtcgcggccgaggtaccagtaaggctggatcttacagagaaagactatgaaatacttttcaaatctattaatggaatccttttccctggaggaagtgttgacctcagacgctcagattatgctaaagtggccaaaatattttataacttgtccatacagagttttgatgatggagactattttcctgtgtggggcacatgccttggatttgaagagctttcactgctgattagtggagagtgcttattaactgccacagatactgttgacgtggcaatgccgctgaacttcactggaggtcaattgcacagcagaatgttccagaattttcctactgagttgttgctgtcattagcagtagaacctctgactgccaatttccataagtggagcctctccgtgaagaattttacaatgaatgaaaagttaaagaagtttttcaatgtcttaactacaaatacagatggcaagattgagtttattt

SEQ ID NO: 2569 - DNA, 128 bp, Homo sapiens
gagcggccgcccgggcaggtactctgtgtgctggtgggtgttggggttggggtcaccgtagtggtggtggtgattggtgtcggagttgggttctctgtggtggtggttgtcatggtggtgggttgggt

SEQ ID NO: 2570 - DNA, 377 bp, Homo sapiens
tcgagcggccgcccgggcaggacacagttagtgggagcacactatataaatcctttgcatgacaccattcaacaatattttttaaaatctacaaaattttaaagtttcacttccctagcaaaatatcttcagtcaagaaattagtctttgaaaattatgaaaattgttgtgggaaatatttatacaaattattactgataatgcacatatattttgaaacattgtttctagaagcaataaaatacaacctatttaggagataacccaaatgatttgtaaaaaaattaacttgtagaaaagggaaggatgttgtgtaaaatcaagtcaattatttgaggtttttataatattgagtacctcggccgcgacccaccgct

SEQ ID NO: 2571 - DNA, 466 bp, Homo sapiens
  misc_feature 454: n = A,T,C or G
gagcggccgcccgggcaggtaccaggcctgtggccctgcagaagagcccacgtgcaaatccagctcctcccagcagaacaacacagtcctggtggaaggctgcttctgtcctgagggcaccatgaactacgctcctggctttgatgtctgcgtgaagacctgcggctgtgtgggacctgacaatgtgcccagagagtttggggagcacttcgagttcgactgcaagaactgtgtctgcctggagggtggaagtggcatcatctgccaacccaagaggtgcagccagaagcccgttacccactgcgtggaagacggcacctacctcgccacggaggtcaaccctgccgacacctgctgcaacattaccgtctgcaagtgcaacaccagcctgtgcaaagagaagccctccgtgtgcccgctgggattcgaagtgaagagcaagatggtgcctggnaggtgctgtccc

SEQ ID NO: 2572 - DNA, 191 bp, Homo sapiens
agcggccgcccgggcaggtacaaatagattcttataatattatttaaatgactgcatttttaaatacaaggctttatatttttaactttaagatgtttttatgtgctctccaaattttttttactgtttctgattgtatggaaatataaaagtaaatatgaaacatttaaaatataatttgttgtcaaagc

SEQ ID NO: 2573 - DNA, 161 bp, Homo sapiens
cgcggccgaggtacaagctttttttttttttttttttttttttttttttaagaataggtttaatttattagttgctctttagcaaaggctatataraacattattggggkgaaaattaaattctagttacagattcatgacctgcccgggcggccgctcga

SEQ ID NO: 2574 - DNA, 492 bp, Homo sapiens
cgagcggccgcccgggcaggtgggccggcggtgcagtcacgggggagcgaggcctgctgggcttggcaacgagggactcggcctcggaggcgacccagaccacacagacactgggtcaaggagtaagcagaggataaacaactggaaggagagcaagcacaaagtcatcatggcttcagcgtctgctcgtggaaaccaagataaagatgcccattttccaccaccaagcaagcagagcctgttgttttgtccaaaatcaaaactgcacatccacagagcagagatctcaaagattatgcgagaatgtcaggaagaaagtttctggaagagagctctgcctttttctcttgtaagcatgcttgtcacccagggactagtctaccaaggttatttggcagctaattctagatttggatcattgcccaaagttgcacttgctggtctcttgggatttggccttggaaaggtatcatacataggagtatgccagag

SEQ ID NO: 2575 - DNA, 435 bp, Homo sapiens
cgagcggccgcccgggcaggtggctcgggacctgcggtacctgctgtagtcacgagggacgggcggcggcctggtcggcagagagtagcctgcaacattcggccgtggttacgatgagtttacccctcaatcccaaacctttcctcaatggactaacaggaaagccagtgatggtgaaacttaagtggggaatggagtacaagggctatctggtatctgtagatggctacatgaacatgcagcttgcaaatacagaagaatacatagatggagctttgtctggacatctgggtgaagttttaataaggtgtaataatgtcctttatatcagaggtgtggaagaagaggaagaagatggggaaatgagagaatagcatcttttgtgggggattttttttatatatatttctagacaataaagatttgtttgttttt

SEQ ID NO: 2576 - DNA, 176 bp, Homo sapiens
  misc_feature 102: n = A,T,C or G
agcgtggtcgcggccgaggtgtacaagcttttttttttttttttttttttttttttttttttkgracaagcttttttttttttttttttttttttaccaacngwaaacagttacttttattttgagtaaaaatmcacattcatwtcattttcccttatatccctmaaatyttaaat

SEQ ID NO: 2577 - DNA, 448 bp, Homo sapiens
cgagcggccgcccgggcaggttttttttttttttttttttttttttttttttttkggccgtttccacacctgccctttattggtctyttytarcaaagtggctccaggcccttcacgcctttyaaacaccacccatgagggtttaggaaggtgccatcattctgtgaaggcccaragcttacccaagtcttggagcccaagttgaatcaccaaccaragggttgggaraggaaaaggaaacaggcagaggggaaaggcaaggctytgcagtgaaggggactgatwtcaagggaatgctgaggtccarcagtgtctcctgaaggcatgctgcatcctaaggctcctcaggactggatggagtaggaaatctgtgtgttgagcagttcacatytatatggcaactttaaggaggcgcttgatgtcaggctcaatgttgatggttgggaag

SEQ ID NO: 2578 - DNA, 93 bp, Homo sapiens
agcgtggtcgcggccgaggtcggcgctcccctaggcatctggggagcgggtgagcggggtgggcacagcccccttcactgccctcgacagctt

SEQ ID NO: 2579 - DNA, 484 bp, Homo sapiens
agcgtggtcgcggccgaggtcaatgttctcatttaaacattacccagcatcattgtttataatcagaaactctggtccttctgcctggtggcacttagagtcttttgtgccataatgcagcagtatggagggaggattttatggagaaatggggatagtcttcatgaccacaaataaataaaggaaaactaagctgcattgtgggttttgaaaaggttattatacttcttaacaattctttttttcagggacttttctagctgtatgactgttacttgaccttctttgaaaagcattcccaaaatgctctattttagatagattaacattaaccaacataattttttttagatcgagtcagcataaatttctaagtcagcctctagccgtggttcatctctttcacctgcattttatttggtgtttgtctgaagaaaggaaagaggaaagcaaatacgaattgtacctgccgggcggccgctcg

SEQ ID NO: 2580 - DNA, 325 bp, Homo sapiens
agcgtggtcgcggccgaggtgcaaaaccccactctgcatcaactgaacgcaaatcagccactttaattaagctaagcccttactagaccaatgggacttaaacccacaaacacttagttaacagctaagcaccctaatcaactggcttcaatctacttctcccgccgccgggaaaaaaggcgggagaagccccggcaggtttgaagctgcttcttcgaatttgcaattcaatatgaaaatcacctcggagctggtaaaaagaggcctaacccctgtctttagatttacagtccaatgcttcactcagccattttacctcaccccc

SEQ ID NO: 2581 - DNA, 543 bp, Homo sapiens
tcgacggccgcccgggcaggtactttgtatttggccaaagcatcttctaggggctttcgaaattgtttagaaactgtattgaaactcggaaactgaatctgagcgaattgacaagtattaaggaggaacaaaacaatatctttccgaagccataatatctggaaggaaggaagctaaaacttgttagataaatcagactttcctacaaaagaggggtttggatagatgatctgaagaattcaggttatagcccagacaggttgcacactgaaattctaattcatttgagccttaattagaggtttatgggcacattatttttagatttgttgtattttattttcaaaatgaaaacaaactgaggaaataacataaacgtttactacttcataatttactcttactcctgtttggtaagttttatattattgtttctttaattgctaaagtaaggggaaatgaaattattgtttatcatattttgacttttcaaattaagcattttttcctttctatacactttgatttttatcatttctcctt

SEQ ID NO: 2582 - DNA, 441 bp, Homo sapiens
cgagcggccgcccgggcaggacgaaaacagaaccaatctaaaaatggctgatgttactttaggagcctgaaaaaaacaggagatccttgaagacccagccaccccttctagaatgttcaataagggcacctttccaaagctactaagcaggcacttggcatttcaggagtttgtcttatggttgcataaaagtatccctttcacccagacctggcaccctttatggttcaaagttaagaacgggaagaatgggtggcaaggtggctcctggaagagctcacccagcacagctgccctgagctcggggccttggtttctgtccctggggatatttatatttaataaatttttatataaatacacagagaaatagaaaatataaaatctgaggggttggggaagaaacgtgagggactcagcaggaagccagagctggagagg

SEQ ID NO: 2583 - DNA, 226 bp, Homo sapiens
ggcggtggtcgcggccgaggtgacgcgacctcagttgtcctgccctgtggaatgggctcaaggttcctgagacacccgattcctgcccaaacagctgtatttatataagtctgttatttattattaatttattggggtgaccttcttggggactcgggggctggtctgatggaactgtgtatttatttaaaactctggtgataaaaataaagctgtctgaactgtt

SEQ ID NO: 2584 - DNA, 161 bp, Homo sapiens
ggccgcccgggcaggtgttactctgtcccacgtccaatcatgggccacaaggcacagtcttctgagcgagtgctctcactgtattagagcgccagctccttggggcagggcctgggcctcawtgcttttgctttccctgaagccctagtagctggcgccca

SEQ ID NO: 2585 - DNA, 125 bp, Homo sapiens
cgagcggccgcccggcaagtgaaggaccaaatctccaacttatctgccacatacaaagcatcattccaggtgctagtgagggaaaaaaaagttggagatttggtccctcgaggagctccasatat

SEQ ID NO: 2586 - DNA, 4792 bp, Homo sapiens
ggaccacccagtaccgatcccttcacgaccgtcaccatggaagtgtcaccattgcagcctgtaaatgaaaatatgcaagtcaacaaaataaagaaaaatgaagatgctaagaaaagactgtctgttgaaagaatctatcaaaagaaaacacaattggaacatattttgctccgcccagacacctacattggttctgtggaattagtgacccagcaaatgtgggtttacgatgaagatgttggcattaactatagggaagtcacttttgttcctggtttgtacaaaatctttgatgagattctagttaatgctgcggacaacaaacaaagggacccaaaaatgtcttgtattagagtcacaattgatccggaaaacaatttaattagtatatggaataatggaaaaggtattcctgttgttgaacacaaagttgaaaagatgtatgtcccagctctcatatttggacagctcctaacttctagtaactatgatgatgatgaaaagaaagtgacaggtggtcgaaatggctatggagccaaattgtgtaacatattcagtaccaaatttactgtggaaacagccagtagagaatacaagaaaatgttcaaacagacatggatggataatatgggaagagctggtgagatggaactcaagcccttcaatggagaagattatacatgtatcacctttcagcctgatttgtctaagtttaaaatgcaaagcctggacaaagatattgttgcactaatggtcagaagagcatatgatattgctggatccaccaaagatgtcaaagtctttcttaatggaaataaactgccagtaaaaggatttcgtagttatgtggacatgtatttgaaggacaagttggatgaaactggtaactccttgaaagtaatacatgaacaagtaaaccacaggtgggaagtgtgtttaactatgagtgaaaaaggctttcagcaaattagctttgtcaacagcattgctacatccaagggtggcagacatgttgattatgtagctgatcagattgtgactaaacttgttgatgttgtgaagaagaagaacaagggtggtgttgcagtaaaagcacatcaggtgaaaaatcacatgtggatttttgtaaatgccttaattgaaaacccaacctttgactctcagacaaaagaaaacatgactttacaacccaagagctttggatcaacatgccaattgagtgaaaaatttatcaaagctgccattggctgtggtattgtagaaagcatactaaactgggtgaagtttaaggcccaagtccagttaaacaagaagtgttcagctgtaaaacataatagaatcaagggaattcccaaactcgatgatgccaatgatgcagggggccgaaactccactgagtgtacgcttatcctgactgagggagattcagccaaaactttggctgtttcaggccttggtgtggttgggagagacaaatatggggttttccctcttagaggaaaaatactcaatgttcgagaagcttctcataagcagatcatggaaaatgctgagattaacaatatcatcaagattgtgggtcttcagtacaagaaaaactatgaagatgaagattcattgaagacgcttcgttatgggaagataatgattatgacagatcaggaccaagatggttcccacatcaaaggcttgctgattaattttatccatcacaactggccctctcttctgcgacatcgttttctggaggaatttatcactcccattgtaaaggtatctaaaaacaagcaagaaatggcattttacagccttcctgaatttgaagagtggaagagttctactccaaatcataaaaaatggaaagtcaaatattacaaaggtttgggcaccagcacatcaaaggaagctaaagaatactttgcagatatgaaaagacatcgtatccagttcaaatattctggtcctgaagatgatgctgctatcagcctggcctttagcaaaaaacagatagatgatcgaaaggaatggttaactaatttcatggaggatagaagacaacgaaagttacttgggcttcctgaggattacttgtatggacaaactaccacatatctgacatataatgacttcatcaacaaggaacttatcttgttctcaaattctgataacgagagatctatcccttctatggtggatggtttgaaaccaggtcagagaaaggttttgtttacttgcttcaaacggaatgacaagcgagaagtaaaggttgcccaattagctggatcagtggctgaaatgtcttcttatcatcatggtgagatgtcactaatgatgaccattatcaatttggctcagaattttgtgggtagcaataatctaaacctcttgcagcccattggtcagtttggtaccaggctacatggtggcaaggattctgctagtccacgatacatctttacaatgctcagctctttggctcgattgttatttccaccaaaagatgatcacacgttgaagtttttatatgatgacaaccagcgtgttgagcctgaatggtacattcctattattcccatggtgctgataaatggtgctgaaggaatcggtactgggtggtcctgcaaaatccccaactttgatgtgcgtgaaattgtaaataacatcaggcgtttgatggatggagaagaacctttgccaatgcttccaagttacaagaacttcaagggtactattgaagaactggctccaaatcaatatgtgattagtggtgaagtagctattcttaattctacaaccattgaaatctcagagcttcccgtcagaacatggacccagacatacaaagaacaagttctagaacccatgttgaatggcaccgagaagacacctcctctcataacagactatagggaataccatacagataccactgtgaaatttgttgtgaagatgactgaagaaaaactggcagaggcagagagagttggactacacaaagtcttcaaactccaaactagtctcacatgcaactctatggtgctttttgaccacgtaggctgtttaaagaaatatgacacggtgttggatattctaagagacttttttgaactcagacttaaatattatggattaagaaaagaatggctcctaggaatgcttggtgctgaatctgctaaactgaataatcaggctcgctttatcttagagaaaatagatggcaaaataatcattgaaaataagcctaagaaagaattaattaaagttctgattcagaggggatatgattcggatcctgtgaaggcctggaaagaagcccagcaaaaggttccagatgaagaagaaaatgaagagagtgacaacgaaaaggaaactgaaaagagtgactccgtaacagattctggaccaaccttcaactatcttcttgatatgcccctttggtatttaaccaaggaaaagaaagatgaactctgcaggctaagaaatgaaaaagaacaagagctggacacattaaaaagaaagagtccatcagatttgtggaaagaagacttggctacatttattgaagaattggaggctgttgaagccaaggaaaaacaagatgaacaagtcggacttcctgggaaaggggggaaggccaaggggaaaaaaacacaaatggctgaagttttgccttctccgcgtggtcaaagagtcattccacgaataaccatagaaatgaaagcagaggcagaaaagaaaaataaaaagaaaattaagaatgaaaatactgaaggaagccctcaagaagatggtgtggaactagaaggcctaaaacaaagattagaaaagaaacagaaaagagaaccaggtacaaagacaaagaaacaaactacattggcatttaagccaatcaaaaaaggaaagaagagaaatccctggcctgattcagaatcagataggagcagtgacgaaagtaattttgatgtccctccacgagaaacagagccacggagagcagcaacaaaaacaaaattcacaatggatttggattcagatgaagatttctcagattttgatgaaaaaactgatgatgaagattttgtcccatcagatgctagtccacctaagaccaaaacttccccaaaacttagtaacaaagaactgaaaccacagaaaagtgtcgtgtcagaccttgaagctgatgatgttaagggcagtgtaccactgtcttcaagccctcctgctacacatttcccagatgaaactgaaattacaaacccagttcctaaaaagaatgtgacagtgaagaagacagcagcaaaaagtcagtcttccacctccactaccggtgccaaaaaaagggctgccccaaaaggaactaaaagggatccagctttgaattctggtgtctctcaaaagcctgatcctgccaaaaccaagaatcgccgcaaaaggaagccatccacttctgatgattctgactctaattttgagaaaattgtttcgaaagcagtcacaagcaagaaatccaagggggagagtgatgacttccatatggactttgactcagctgtggctcctcgggcaaaatctgtacgggcaaagaaacctataaagtacctggaagagtcagatgaagatgatctgttttaaaatgtgaggcgattattttaagtaattatcttaccaagcccaagactggttttaaagttacctgaagctcttaacttcctcccctctgaatttagtttggggaaggtgtttttagtacaagacatcaaagtgaagtaaagcccaagtgttctttagcttt

SEQ ID NO: 2587 - DNA, 1699 bp, Homo sapiens
aggtgagcggttgctcgtcgtcggggcggccggcagcggcggctccagggcccagcatgcgcgggggaccccgcggccaccatgtatgtgggctatgtgctggacaaggattcgcccgtgtaccccggcccagccaggccagccagcctcggcctgggcccggcaaactacggccccccggccccgcccccggcgcccccgcagtaccccgacttctccagctactctcacgtggagccggcccccgcgcccccgacggcctggggggcgcccttccctgcgcccaaggacgactgggccgccgcctacggcccgggccccgcggcccctgccgccagcccagcttcgctggcattcgggccccctccagactttagcccggtgccggcgccccctgggcccggcccgggcctcctggcgcagcccctcgggggcccgggcacaccgtcctcgcccggagcgcagaggccgacgccctacgagtggatgcggcgcagcgtggcggccggaggcggcggtggcagcggtaagactcggaccaaggacaagtaccgcgtggtctacaccgaccaccaacgcctggagctggagaaggagtttcattacagccgttacatcacaatccggcggaaatcagagctggctgccaatctggggctcactgaacggcaggtgaagatctggttccaaaaccggcgggcaaaggagcgcaaagtgaacaagaagaaacagcagcagcaacagcccccacagccgccgatggcccacgacatcacggccaccccagccgggccatccctggggggcctgtgtcccagcaacaccagcctcctggccacctcctctccaatgcctgtgaaagaggagtttctgccatagccccatgcccagcctgtgcgccgggggacctggggactcgggtgctgggagtgtggctcctgtgggcccaggaggtctggtccgagtctcagccctgaccttctgggacatggtggacagtcacctatccaccctctgcatccccttggcccattgtgtgcagtaagcctgttggataaagaccttccagctcctgtgttctagacctctgggggataagggagtccagggtggatgatctcaatctcccgtgggcatctcaagccccaaatggttgggggaggggcctagacaaggctccaggccccacctcctcctccatacgttcagaggtgcagctggaggcctgtgtggggaccacactgatcctggagaaaagggatggagctgaaaaagatggaatgcttgcagagcatgacctgaggagggaggaacgtggtcaactcacacctgcctcttctgcagcctcacctctacctgcccccatcataagggcactgagcccttcccaggctggatactaagcacaaagcccatagcactgggctctgatggctgctccactgggttacagaatcacagccctcatgatcattctcagtgagggctctggattgagagggaggccctgggaggagagaagggggcagagtcttccctaccaggtttctacacccccgccaggctgcccatcagggcccagggagcccccagaggactttattcggaccaagcagagctcacagctggacaggtgttgtatatagagtggaatctcttggatgcagcttcaagaataaatttttcttctcttttcaaa

SEQ ID NO: 2588 - DNA, 2148 bp, Homo sapiens
cactagcagagaagctgttgtccttccaccaccagcaccggaccacctgctccaagaccagcctcctggggggaccaggcacccggccttcactggcacccagggagccgtcctcagcagcgtcaacatgtcaaggcccagcagcagagccatttacttgcaccggaaggagtactcccagaacctcacctcagagcccaccctcctgcagcacagggtggagcacttgatgacatgcaagcaggggagtcagagagtccaggggcccgaggatgccttgcagaagctgttcgagatggatgcacagggccgggtgtggagccaagacttgatcctgcaggtcagggacggctggctgcagctgctggacattgagaccaaggaggagctggactcttaccgcctagacagcatccaggccatgaatgtggcgctcaacacatgctcctacaactccatcctgtccatcaccgtgcaggagccgggcctgccaggcactagcactctgctcttccagtgccaggaagtgggggcagagcgactgaagaccagcctgcagaaggctctggaggaagagctggagcaaagacctcgacttggaggccttcagccaggccaggacagatggagggggcctgctatggaaaggccgctccctatggagcaggcacgctatctggagccggggatccctccagaacagccccaccagaggaccctagagcacagcctcccaccatccccaaggcccctgccacgccacaccagtgcccgagaaccaagtgcctttactctgcctcctccaaggcggtcctcttcccccgaggacccagagagggacgaggaagtgctgaaccatgtcctaagggacattgagctgttcatgggaaagctggagaaggcccaggcaaagaccagcaggaagaagaaatttgggaaaaaaaacaaggaccagggaggtctcacccaggcacagtacattgactgcttccagaagatcaagtacagcttcaacctcctgggaaggctggccacctggctgaaggagacaagtgcccctgagctcgtacacatcctcttcaagtccctgaacttcatcctggccaggtgccctgaggctggcctagcagcccaagtgatctcacccctcctcacccctaaagctatcaacctgctacagtcctgtctaagcccacctgagagtaacctttggatggggttgggcccagcctggaccactagccgggccgactggacaggcgatgagcccctgccctaccaacccacattctcggatgactggcaacttccagagccctccagccaagcacccttaggataccaggaccctgtttcccttcggccctccagccccaaacctgcccagccagccctgaaaatgcaagtcttgtacgagtttgaagctaggaacccacgggaactgactgtggtccagggagagaagctggaggttctggaccacagcaagcggtggtggctggtgaagaatgaggcgggacggagcggctacattccaagcaacatcctggagcccctacagccggggacccctgggacccagggccagtcaccctctcgggttccaatgcttcgacttagctcgaggcctgaagaggtcacagactggctgcaggcagagaacttctccactgccacggtgaggacacttgggtccctgacggggagccagctacttcgcataagacctggggagctacagatgctatgtccacaggaggccccacgaatcctgtcccggctggaggctgtcagaaggatgctggggataagcccttaggcaccagcttagacacctccaagaaccaggccccgctgatgcaagatggcagatctgatacccattagagccccgagaattcctcttctggatcccagtttgcagcaaaccccacaccccagctcacacagcaaaaacaatggacaggcccagagggtgaagcaaacagtgtcccttctggctgtgttggagcctccccagtaaccacctatttattttacctctttcccaaacctggagcatttatgcctaggcttgtcaagaatctgttcagtccctctccttctcaataaaagcatcttcaagcttgtaaaaaaaaaaaaaaaaaa

SEQ ID NO: 2589 - DNA, 1918 bp, Homo sapiens
cccagagcaagccgattctctacacactgccttcccttcctgtaagactcatcaaaaaggcaccccaaccttgcatggatctgctgttggtattccttggggtgaagccagaagtcaggctttccacagagagacgggactacatggccacctgggaaggctagggagtcaaagggcctgaggaatgactacttccctccacaagggcattccctgccctgctctgcttcctgggggcttcagcaagccttccttctagagctcctagaaccctcccatggtcaacacaacagcagcccagacaatgagatgcaagaggcctgagctcacaggccattcaggtcttctagatgccttcttgaggctgcttgtggccacccacagacacttgtaaggaggagagaagtcagcctggcagagagactctgaaatgagggattagaggtgttcaaggagcaagagcttcagcctgaagacaagggagcagtccctgaagacgcttctactgagaggtctgccatggcctctcttggcctccaacttgtgggctacatcctaggccttctggggcttttgggcacactggttgccatgctgctccccagctggaaaacaagttcttatgtcggtgccagcattgtgacagcagttggcttctccaagggcctctggatggaatgtgccacacacagcacaggcatcacccagtgtgacatctatagcacccttctgggcctgcccgctgacatccaggctgcccaggccatgatggtgacatccagtgcaatctcctccctggcctgcattatctctgtggtgggcatgagatgcacagtcttctgccaggaatcccgagccaaagacagagtggcggtagcaggtggagtctttttcatccttggaggcctcctgggattcattcctgttgcctggaatcttcatgggatcctacgggacttctactcaccactggtgcctgacagcatgaaatttgagattggagaggctctttacttgggcattatttcttccctgttctccctgatagctggaatcatcctctgcttttcctgctcatcccagagaaatcgctccaactactacgatgcctaccaagcccaacctcttgccacaaggagctctccaaggcctggtcaacctcccaaagtcaagagtgagttcaattcctacagcctgacagggtatgtgtgaagaaccaggggccagagctggggggtggctgggtctgtgaaaaacagtggacagcaccccgagggccacaggtgagggacactaccactggatcgtgtcagaaggtgctgctgaggatagactgactttggccattggattgagcaaaggcagaaatgggggctagtgtaacagcatgcaggttgaattgccaaggatgctcgccatgccagcctttctgttttcctcaccttgctgctcccctgccctaagtccccaaccctcaacttgaaaccccattcccttaagccaggactcagaggatccctttgccctctggtttacctgggactccatccccaaacccactaatcacatcccactgactgaccctctgtgatcaaagaccctctctctggctgaggttggctcttagctcattgctggggatgggaaggagaagcagtggcttttgtgggcattgctctaacctacttctcaagcttccctccaaagaaactgattggccctggaacctccatcccactcttgttatgactccacagtgtccagactaatttgtgcatgaactgaaataaaaccatcctacggtatccagggaacagaaagcaggatgcaggatgggaggacaggaaggcagcctgggacatttaaaaaaaaaaaaaaaaaaaaaaaaaaaaaaaaaaaaaaaaaaaaaaaaaaaaaa

SEQ ID NO: 2590 - protein, 230 aa, Homo sapiens
MASLGLQLVGYILGLLGLLGTLVAMLLPSWKTSSYVGASIVTAVGFSKGLWMECATHSTGITQCDIYSTLLGLPADIQAAQAMMVTSSAISSLACIISVVGMRCTVFCQESRAKDRVAVAGGVFFILGGLLGFIPVAWNLHGILRDFYSPLVPDSMKFEIGEALYLGIISSLFSLIAGIILCFSCSSQRNRSNYYDAYQAQPLATRSSPRPGQPPKVKSEFNSYSLTGYV

SEQ ID NO: 2591 - protein, 563 aa, Homo sapiens [sequence omitted]

SEQ ID NO: 2592 - protein, 265 aa, Homo sapiens
MYVGYVLDKDSPVYPGPARPASLGLGPANYGPPAPPPAPPQYPDFSSYSHVEPAPAPPTAWGAPFPAPKDDWAAAYGPGPAAPAASPASLAFGPPPDFSPVPAPPGPGPGLLAQPLGGPGTPSSPGAQRPTPYEWMRRSVAAGGGGGSGKTRTKDKYRVVYTDHQRLELEKEFHYSRYITIRRKSELAANLGLTERQVKIWFQNRRAKERKVNKKKQQQQQPPQPPMAHDITATPAGPSLGGLCPSNTSLLATSSPMPVKEEFLP

SEQ ID NO: 2593 - protein, 1531 aa, Homo sapiens [sequence omitted]

SEQ ID NO: 2594 - DNA, 503 bp, Homo sapiens
  misc_feature 445: n = A,T,C or G
cccgggtggcggtggcagctgcgaaacccagggagccgatgccacgtgacccaatgtggacttcttttaaacctttctaatgcccataacccagcctcagacccatggagcccacgagagactgcccgctgttcgggggcgccttttccgccatcctccccatgggggccattgacgtaagcgacctccgaccggtcccggacaatcaagaagttttctgccatcccgtgacggaccagagcctgatagtggaacttctcgagctgcaggcccacgtacggggcgaagcggctgcgcggtaccactttgaggatgttggtggcgtgcagggggctagggctgtccatgtggagtctgttcagcctctcagtttggagaacctggccctgaggggccgctgtcaagaagcctgggtcctctctggcaagcagcagatagctaaggnaaaccagcaggtagcaaaggacgtgacacttcatcaggccttgctgaggctgccccag

SEQ ID NO: 2595 - DNA, 505 bp, Homo sapiens
ggctttgctgccacctggtgtcagcctcagtcactttctctgaatgcttctgagccttgcctacatctctgagccttaactacatgtctgtgggtatcacactgagtgtgagttgtgtccacacgtgctcaagcagaaggacttttgtgtccatgcttgtgtctagaaaacagactggggaaccttatgtgagcagcacatcccaccagtgaaacagggtattgctcttcttcttttcttgatcttcctgtctgggcagacttcagagactttgtggcctggaggcctattaagcacgacacagtatcagtggaattgatccataaacctccctgtccacatcttgcccaatggggaatggatctttcaccaaagagctcaccagcattttccacagagatgcaaattctgagcccttggagttcccagtggattcaaggaaggaagtgggaacaaggttggatgcctacttatgagcttgaccatcacagctatcggtaatcag

SEQ ID NO: 2596 - DNA, 604 bp, Homo sapiens
  misc_feature 543,560: n = A,T,C or G
cgcagccatggctcgtggtcccaagaagcatctgaagcgggtggcagctccaaagcattggatgctggataaattgaccggtgtgtttgctcctcgtccatccaccggtccccacaagttgagagagtgtctccccctcatcattttcctgaggaacagacttaagtatgccctgacaggagatgaagtaaagaagatttgcatgcagcggttcattaaaatcgatggcaaggtccgaactgatataacctaccctgctggattcatggatgtcatcagcattgacaagacgggagagaatttccgtctgatctatgacaccaagggtcgctttgctgtacatcgtattacacctgaggaggccaagtacaagttgtgcaaagtgagaaagatctttgtgggcacaaaaggaatccctcatctggtgactcatgatgcccgcaccatccgctaccccgatcccctcatcaaggtgaatgataccattcagattgatttggagactggcaagattactgatttcatcaagttcgacactggtancctgtgtatggtgactngaggtgctaacctaggaagaattggtgtgatcaccaacagagag

SEQ ID NO: 2597 - DNA, 508 bp, Homo sapiens
  misc_feature 431,497: n = A,T,C or G
ggcgacctccgcgcgttgggaggtgtagcgcggctctgaacgcgctgagggccgttgagtgtcgcaggcggcgagggcgcgagtgaggagcagacccaggcatcgcgcgccgagaaggccgggcgtccccacactgaaggtccggaaaggcgacttccgggggctttggcacctggcggaccctcccggagcgtcggcacctgaacgcgaggcgctccattgcgcgtgcgcgttgaggggcttcccgcacctgatcgcgagaccccaacggctggtggcgtcgcctgcgcgtctcggctgagctggccatggcgcagctgtgcgggctgaggcggagccgggcgtttctcgccctgctgggatcgctgctcctctctggggtcctggcggccgaccgagaacgcagcatccacgacttctgcctggtgtcmaaggtggtgggcagatgccgggcctccatgcctaggtggtggtacaatgtcactgacggatcctgncagctgtttgt

SEQ ID NO: 2598 - DNA, 529 bp, Homo sapiens
  misc_feature 164,177,211,223,356,365,392,407,432,459: n = A,T,C or G
ttttttttttttttttggggatatgacctttattgaacttatccaccagagtggaaataatgtctgtacaaaaccaaatgtttgttactataacttctgcatcacaattaaaatccaaacagttttttaaaaacagtcaactcaatcaaaacccactacttcaraatcaatagcttytttgaagccacagtaacacttaaatatggttaaractcgaatgcaraaatttggttggttggaaagctaattaaacttccaacttgctcaaatagaattacaaaaaggcaaaattgtgtttttcacagagatacagtccactggaatcaccaacactggacagctgttagagtatttaragtcctgarataacaaggaatccaggcatcctttaracagtcttctgttgkcctttcttcccaatcagagatttgkggatgtgtggaatgacaccaccaccarcaatttgtagccttgatgagagaatccaattcttcatctccacgaatagcaagttgcaagtgacgagggg

SEQ ID NO: 2599 - DNA, 391 bp, Homo sapiens
cgctccaagcccagccctcagccatggcatgccccctggatcaggccattggcctcctcgtggccatcttccacaagtactccggcagggagggtgacaagcacaccctgagcaagaaggagctgaaggagctgatccagaaggagctcaccattggctcgaagctgcaggatgctgaaattgcaaggctgatggaagacttggaccggaacaaggaccaggaggtgaacttccaggagtatgtcaccttcctgggggccttggctttgatctacaatgaagccctcaagggctgaaaataaatagggaagatggagacaccctctgggggtcctctctgagtcaaatccagtggtgggtaattgtacaataaattttttttggtcaaatt

SEQ ID NO: 2600 - DNA, 582 bp, Homo sapiens
  misc_feature 527,531,553: n = A,T,C or G
tttttttttttttttaaggtgacaatcacatcaattttattttataacaaatagaatcatgtcccagttccaaaacaaaataaatagtaatgttaatatagagatttactcatggccttttttgttaaagagtcttaaaatgtttctttggacaatttaaaaattttcaatgttttttttactcccatacaacctagcccccctgccaaataaaaatcaagcatattttctcctgtatcttgtgtataggttatataatagtaccttttatctttaagatatgagctgaaaccccacctatggttgtagtgagcatcctactttacgcctcttatctcctttaaattcaaaacaggtatctcaaaaataaagttaatataggtttataagtaggacttgctcactcctgaaagtacgtttaagtaaatctccaaacacatttcaaatactctcagagagtctgttttatactaccaagtatcttatccacatttcttcaaaataaacaaaaaaatgctcacaaaatwtctwtgagaaacaagaagataaaatwtaaaatcttaatttttacatataaaataa

SEQ ID NO: 2601 - DNA, 235 bp, Homo sapiens
  misc_feature 105,115: n = A,T,C or G
tttttttttttttttttcagtgttctcacatctttttaatcattcatattgacttaatcaggttgacaaaatctcagggttggtctgggatcattcacaaatcaraattactcaragaaattttcacagcagttgcagcagcacaaactctaacgctgatttaaattaataactgttattaatgaacaaacttgaaaaaggaatttcatatagaacattacatttctccctgaca

SEQ ID NO: 2602 - DNA, 2292 bp, Homo sapiens
ggggtcagcttcttagaatactacaggaagcaatacaaccaagagatcaccgacttgaagcagcctgtcttggtcagccagcccaagagaaggcggggccctggggggacactgccagggcctgccatgctcattcctgagctctgctatcttacaggtctaactgataaaatgcgtaatgattttaacgtgatgaaagacttagccgttcatacaagactaactccagagcaaaggcagcgtgaagtgggacgactcattgattacattcataaaaacgataatgttcaaagggagcttcgagactggggtttgagctttgattccaacttactgtccttctcaggaagaattttgcaaacagaaaagattcaccaaggtggaaaaacatttgattacaatccacaatttgcagattggtccaaagaaacaagaggtgcaccattaattagtgttaagccactagataactggctgttgatctatacgcgaagaaattatgaagcagccaattcattgatacaaaatctatttaaagttacaccagccatgggcatgcaaatgagaaaagcaataatgattgaagtggatgacagaactgaagcctacttaagagtcttacagcaaaaggtcacagcagacacccagatagttgtctgtctgttgtcaagtaatcggaaggacaaatacgatgctattaaaaaatacctgtgtacagattgccctaccccaagtcagtgtgtggtggcccgaaccttaggcaaacagcaaactgtcatggccattgctacaaagattgccctacagatgaactgcaagatgggaggagagctctggagggtggacatccccctgaagctcgtgatgatcgttggcatcgattgttaccatgacatgacagctgggcggaggtcaatcgcaggatttgttgccagcatcaatgaagggatgacccgctggttctcacgctgcatatttcaggatagaggacaggagctggtagatgggctcaaagtctgcctgcaagcggctctgagggcttggaatagctgcaatgagtacatgcccagccggatcatcgtgtaccgcgatggcgtaggagacggccagctgaaaacactggtgaactacgaagtgccacagtttttggattgtctaaaatccattggtagaggttacaaccctagactaacggtaattgtggtgaagaaaagagtgaacaccagattttttgctcagtctggaggaagacttcagaatccacttcctggaacagttattgatgtagaggttaccagaccagaatggtatgacttttttatcgtgagccaggctgtgagaagtggtagtgtttctcccacacattacaatgtcatctatgacaacagcggcctgaagccagaccacatacagcgcttgacctacaagctgtgccacatctattacaactggccaggtgtcattcgtgttcctgctccttgccagtacgcccacaagctggcttttcttgttggccagagtattcacagagagccaaatctgtcactgtcaaaccgcctttactacctctaacctgcagaagacgatgcagccgcttttctttttgaaatgactttgggatttttttaagcttttatttactttttttttaactgttatctttctggatgaaacttgggaaggggattaggagatctagcattttatttctagcattgctattcaccggcttccttattttatatgtaaaaattaagattttatattttatcttcttgtttctcatagatattttgtgagcatttttttgtttattttgaagaaatgtggataagatacttggtagtataaaacagactctctgagagtatttgaaatgtgtttggagatttacttaaacgtactttcaggagtgagcaagtcctacttataaacctatattaactttatttttgagatacctgttttgaatttaaaggagataagaggcgtaaagtaggatgctcactacaaccataggtggggtttcagctcatatcttaaagataaaaggtactattatataacctatacacaagatacaggagaaaatatgcttgatttttatttggcaggggggctaggttgtatgggagtaaaaaaaacattgaaaatttttaaattgtccaaagaaacattttaagactctttaacaaaaaaggccatgagtaaatctctatattaacatcactatttattttgttttggaactgggacatgattctatttgttataaaataaaattgatgtccc

SEQ ID NO: 2603 - protein, 523 aa, Homo sapiens
GVSFLEYYRKQYNQEITDLKQPVLVSQPKRRRGPGGTLPGPAMLIPELCYLTGLTDKMRNDFNVMKDLAVHTRLTPEQRQREVGRLIDYIHKNDNVQRELRDWGLSFDSNLLSFSGRILQTEKIHQGGKTFDYNPQFADWSKETRGAPLISVKPLDNWLLIYTRRNYEAANSLIQNLFKVTPAMGMQMRKAIMIEVDDRTEAYLRVLQQKVTADTQIVVCLLSSNRKDKYDAIKKYLCTDCPTPSQCVVARTLGKQQTVMAIATKIALQMNCKMGGELWRVDIPLKLVMIVGIDCYHDMTAGRRSIAGFVASINEGMTRWFSRCIFQDRGQELVDGLKVCLQAALRAWNSCNEYMPSRIIVYRDGVGDGQLKTLVNYEVPQFLDCLKSIGRGYNPRLTVIVVKKRVNTRFFAQSGGRLQNPLPGTVIDVEVTRPEWYDFFIVSQAVRSGSVSPTHYNVIYDNSGLKPDHIQRLTYKLCHIYYNWPGVIRVPAPCQYAHKLAFLVGQSIHREPNLSLSNRLYYL

SEQ ID NO: 2604 - DNA, 447 bp, Homo sapiens
tttttttttttttttatttaaaaattttctttatttcaaaactgcctttatgtacagacatcatttaaaaaatgcacatacaatggarattttccaaggaacaggagctggaaataaaatttaaggacattattaraactgaaattgtcccaragaagttctgaggatcaggattccttaaatgtccttgataacctcttmaagttcttcctttgkgaacatgtggaaattctggccaggctgcactgkggctagctcaatgtttgttgcattcagcttctcctccattacttgtttgaggatgatgagtgaaracttgatggcttctttcaaagtcataracttgkggtaaacttcttgcaaggagctctgggcaccctctgaagcagagccaattgctcgagcatcacactgtacaaaggtcccagatgggtccatatgaaacag

SEQ ID NO: 2605 - DNA, 802 bp, Homo sapiens
cactcccaaagaactgggtactcaacactgagcagatctgttctttgagctaaaaaccatgtgctgtaccaagagtttgctcctggctgctttgatgtcagtgctgctactccacctctgcggcgaatcagaagcagcaagcaactttgactgctgtcttggatacacagaccgtattcttcatcctaaatttattgtgggcttcacacggcagctggccaatgaaggctgtgacatcaatgctatcatctttcacacaaagaaaaagttgtctgtgtgcgcaaatccaaaacagacttgggtgaaatatattgtgcgtctcctcagtaaaaaagtcaagaacatgtaaaaactgtggcttttctggaatggaattggacatagccctaagaactagaaagaaccttgctggggttggaggtttcacttgcacatcatggagggtttagtgcttatctaatttgtgcctcactggacttgtccaattaatgaagttgattcatattgcatcatagtttgctttgtttaagcatcacattaaagttaaactgtattttatgttatttatagctgtaggttttctgtgtttagctatttaatactaattttccataagctattttggtttagtgcaaagtataaaattatatttgggggggaataagattatatggactttcttgcaagcaacaagctattttttaaaaaaaactatttaacattcttttgtttatattgttttgtctcctaaattgttgtaattgcattataaaataagaaaaatattaataagacaaatatt

SEQ ID NO: 2606 - protein, 96 aa, Homo sapiens
MCCTKSLLLAALMSVLLLHLCGESEAASNFDCCLGYTDRILHPKFIVGFTRQLANEGCDINAIIFHTKKKLSVCANPKQTWVKYIVRLLSKKVKNM

What is claimed:

1. An isolated polynucleotide comprising a sequence selected from the group consisting of:
(a) sequences provided in SEQ ID NO:1-2589, 2594-2602, and 2604-2605;
(b) complements of the sequences provided in SEQ ID NO:1-2589, 2594-2602, and 2604-2605;
(c) sequences consisting of at least 20 contiguous residues of a sequence provided in SEQ ID NO:1-2589, 2594-2602, and 2604-2605;
(d) sequences that hybridize to a sequence provided in SEQ ID NO:1-2589, 2594-2602, and 2604-2605, under moderately stringent conditions;
(e) sequences having at least 75% identity to a sequence of SEQ ID NO:1-2589, 2594-2602, and 2604-2605;
(f) sequences having at least 90% identity to a sequence of SEQ ID NO:1-2589, 2594-2602, and 2604-2605; and
(g) degenerate variants of a sequence provided in SEQ ID NO:1-2589, 2594-2602, and 2604-2605.

2. An isolated polypeptide comprising an amino acid sequence selected from the group consisting of:
(a) sequences encoded by a polynucleotide of claim 1; and
(b) sequences having at least 70% identity to a sequence encoded by a polynucleotide of claim 1; and
(c) sequences having at least 90% identity to a sequence encoded by a polynucleotide of claim 1.
(d) sequences set forth in SEQ ID NO:2590-2593, 2603, and 2606;
(e) sequences having at least 70% identity to a sequence set forth in SEQ ID NO:2590-2593, 2603, and 2606; and
(f) sequences having at least 90% identity to a sequence set forth in SEQ ID NO:2590-2593, 2603, and 2606.

3. An expression vector comprising a polynucleotide of claim 1 operably linked to an expression control sequence.

4. A host cell transformed or transfected with an expression vector according to claim 3.

5. An isolated antibody, or antigen-binding fragment thereof, that specifically binds to a polypeptide of claim 2.

6. A method for detecting the presence of a cancer in a patient, comprising the steps of:
(a) obtaining a biological sample from the patient;
(b) contacting the biological sample with a binding agent that binds to a polypeptide of claim 2;
(c) detecting in the sample an amount of polypeptide that binds to the binding agent; and
(d) comparing the amount of polypeptide to a predetermined cut-off value and therefrom determining the presence of a cancer in the patient.

7. A fusion protein comprising at least one polypeptide according to claim 2.

8. An oligonucleotide that hybridizes to a sequence recited in SEQ ID NO:1-2589, 2594-2602, and 2604-2605 under moderately stringent conditions.

9. A method for stimulating and/or expanding T cells specific for a tumor protein, comprising contacting T cells with at least one component selected from the group consisting of:
(a) polypeptides according to claim 2;
(b) polynucleotides according to claim 1; and
(c) antigen-presenting cells that express a polynucleotide according to claim 1,
under conditions and for a time sufficient to permit the stimulation and/or expansion of T cells.

10. An isolated T cell population, comprising T cells prepared according to the method of claim 9.

11. A composition comprising a first component selected from the group consisting of physiologically acceptable carriers and immunostimulants, and a second component selected from the group consisting of:
(a) polypeptides according to claim 2;
(b) polynucleotides according to claim 1;
(c) antibodies according to claim 5;
(d) fusion proteins according to claim 7;
(e) T cell populations according to claim 10; and
(f) antigen presenting cells that express a polypeptide according to claim 2.

12. A method for stimulating an immune response in a patient, comprising administering to the patient a composition of claim 11.

13. A method for the treatment of a cancer in a patient, comprising administering to the patient a composition of claim 11.

14. A method for determining the presence of a cancer in a patient, comprising the steps of:
(a) obtaining a biological sample from the patient;
(b) contacting the biological sample with an oligonucleotide according to claim 8;
(c) detecting in the sample an amount of a polynucleotide that hybridizes to the oligonucleotide; and
(d) compare the amount of polynucleotide that hybridizes to the oligonucleotide to a predetermined cut-off value, and therefrom determining the presence of the cancer in the patient.

15. A diagnostic kit comprising at least one oligonucleotide according to claim 8.

16. A diagnostic kit comprising at least one antibody according to claim 5 and a detection reagent, wherein the detection reagent comprises a reporter group.

17. A method for inhibiting the development of a cancer in a patient, comprising the steps of:
(a) incubating CD4+ and/or CD8+ T cells isolated from a patient with at least one component selected from the group consisting of: (i) polypeptides according to claim 2; (ii) polynucleotides according to claim 1; and (iii) antigen presenting cells that express a polypeptide of claim 2, such that T cell proliferate;
(b) administering to the patient an effective amount of the proliferated T cells,
and thereby inhibiting the development of a cancer in the patient.
